United States Patent Application Publication US 2024/0075084 A1 - sequence listing, part 2

SEQ ID NO: 18 - DNA, 175650 bp, Unknown
  bacteriophage strain capable of infecting bacteria of the genus Klebsiella
tttcgtgaatcctggatctcacattcaccgttttccatgaacgctttcaggatcgtttgtacttcctcactatacttgtaatcagcataatcagttttccaatctttaccctgtgctttttgatacagaatttcatcaagtacccaataaccgatcggggtaaagctggtatcacgccacggaatcgggtgaaccgtccatttagaaacaagatcatcagaataagtggtcacggtgattgtatcagacgtggtttctgttgctgattcttcatcagcaccgtgttttaagatcagggtataatcaccagcagttgtaccgtcaaccgtagttgtgtaagtatcggcggttgcgcctggaatatctacaccgtctttttgccaacgataggccagaaacacatcacccggatctagttcagtagtttcaacctctaaggtcaaagtttcgccaatcaaaagttcgtttttgttggcgctaattgttacagaaggaattgccataaatttagcctcttatgtttattggtatttatagccggagtattttaccgttacacgttccgcatttgtcgtagccgttaacacgtccatacccattgcattcaggacaaaacggagtagtaaccccgaaaatgttacggatcgcataagtggattgttcttcggtcaacccaacaaacccatcagttttaataaaatgttctttttgtgaagaaagcatatcggtatcatcatcaagaatgagatagtttttacatccgaaagtatcgatccatgccttgatttcatcaccacgcattccagtactatgagggaagttagtgcaagttttaccaatgatccgatacaatccccacggataaaatatttcacgtagattatgggtactgttgccgattctccacgtagaggaaatgacgatatcacaattagcgtgattcactatccggcgtaagtgtcgtgcgcattcgatgtccatatgttcaccaaatttcatgcaccgcatattatttagaacgccatcgatatcaagaaaaataacgttaccaatctcgttaccatcgctcaaatcttttaaacattcgtgatttaagttcatatttcacctaaaagaaaaggggccgtagccccttgttaatcaatagaatccgcgagcttcattatccagtctacgatctgcaatcatatgagcttccatttgacgagatacgtaatcaggatcacactccattctttcttcttcgtagttgtcccaggtatcagcaacccatttagaaccgttccaacgagcataaccaggttcggcatgaacaggataatttgcttccgcagcgtggcgaagtgcttcacctacagtgtaataaggagctttagaattgacgattttcttaacttcaccattagcccaaacaaacagaactgggtagtaagcatttttcatcatgttcattttgtatttccttcttcactgcgagagccattcccccgccttcgaatacaaatatactcgaacagcagggtaaggtcaactactttttaaaattattttttgaacgtgtcgaactggctatttctggtttcgcgtacagtaaccatcccatcacggtgcatgtaccatgccagtgacttgagggtttgacgcgctgaataatgaggacaaccatcagggtgcttataccaatccggattttgtttcatccaatcatagatccaatacggacacgtataaaagccagcattcgaaacagagcggcccatcatgatgatagacggggtaaacccttccatccatgccagttcatcagaaaccgtctcagaatcgcttgtaggagcttgtagagcgtcgggaacaatttcaatctggtcggcaatttccggagcaacatcaggaacagatggttcaccttcgtatgtaacaatttccggatcaggggagtcgatcaacagttccggtttttcttccggtacggcagcttccagatcagcaagcatattttcgaatgacttctgacggttcagtttgacatcaaacgtttcttgcgcgtaggtagcaagctgtaatttggcttctttttgttctaaggctttgaaaccttcaaccttttcgtaatcaatactcattgtagttctccaatgtttatcattatttagcctataaatattcatataaaccgtatataggatacacatagtggatatcgaagtcaaattccttaacactagtcatgtgcagattcaggcagaggctaacatagtctatgaattgcgcgactatttcagcttccagccgccaggttatcagtaccaggcaaaatacaaatatggtggatggaacggctacatatacttgatggactataacgggaaactgccctacggtttagcctatcttgtaacaaaattcgcggagtctcgcgggtattctatctggatggatcctaagatccacgaaacagaagaaattacccagccagattttgacaagtggttagaagaacacccagtatacgacggaaacaagcaaattgatccgtattggtatcaaaaacaatcggtgtttcatgcgattaaaaaccgccgtgctgtgcttaacctcccaacgtcagcgggtaaatctcttattcagggattgatatctcgttggtgtctggaaaattacacaggcaaagtactaatcattgtcccaacaactgcccttgttgatcagatgatcggtgatatcgtcaactatcgccttttacctcgcgaggcaatgcttggaatacggtcaggaactgctaaaaacagtaatgcattgatctacgtgtctacgtggcaatcggctgttaaaatgcctcctgagtggtttcagcagttcatgtgtttgatggtggatgaatgccacaaatcaaccggacaaagcatacagaagatcatcaacacaatggatcagtgtattttcaagtttggcctttctggttctctgaaagaaggcaaagcaaacatgatgcaatacattggcgcttttggtcaaatcttcaagccagttgatacaaatcggttgatgcaggaaggtcaagttaccaaccttcgaattaataccatcttcatgagatataaagaggatgagattaagaaaatgaagggggcagattaccaaagcgaaatcaagtatataacatcgcataccaggcgtaacgcatggatctgtaagctggcgttgaaactggcaagggaaaaagatgaaaacgtgtttgtgatgttcaatcagatcaaacatggtaaatggctgtatgagcaactcaaaaaggtatatgacaacgttgtatacatttctggggaaacggggattgatgagcgaaacgaaatgaaacggatcgcggaatcaacgaaggggctgatcgtaatcggttctattggtgtactgagtacaggtatttctgtcaagaacctgcatcacatcatcttcggacatccttgcaaatctgctgttatagtcaaacagtcaattgggcgcgtactgcgtaaacatgattctaaatctcttgctactgtttgggatttggttgataacttagcaacgctggcaaagtccaaaaatgctaaaaataaatattcatacaaaaactatggtatgaaacacgcaatcgaacgagtacgcatttacaatgaagaaaagtttgactacgtgatcaaacaaatcgaaatttagaggtcaaaatgaagagtttcaacgattttcgactttatgaggcggctattgatgatttcatgagcaaggtcgcctcttgccgtactatggacggccttaaagagcttgaaaaatattacaaaaatcgtgtaaaagaagttgatgttgcgccgtcagacgatatttctatgcgcgatgcgctgaaaggtcgagccgaagaattaaaggccgaactcgaaagcggagaagaagaaaagttctaaaaaaagccccaaccgaaaggaaggggctttttaattttgggacgcaatcagcccaacacgtacatttgattatagccagtgaggtactattctggctttttttactcatgcccttgatcgaaggtatgttatcaatcaccccgccgaaggtaaactccatcggacggcgcaaaagagtacgcctatcatccagcattcttttatcaagcccctttcgggtacgctagtatttataccctaaaaatcagggtgttcgtcagattctaagagatctggacgttcatcacgatctgtaattccttcaccgtaaccaatcataagattctcctacagcaacatttgaacttcattcagatcatcggattcgttgatctcgccgttttttgttttttctgcgatgtagtcagcacagatagtactacacacgcgcccggattcagtcacaaaaccagtagaaggaaccggacacttgcacactacacatttttcattttcagtagacattatgcaccactttctaatttacggatctctaacatgtttttgatagagtatcctttgtttttgacgatatccagtgctttgctggtgaaatctaccaccatgtcataatactggatcagcttgttggtttctacaatcttcggatccccagcgatcgcgattttgatttcagtagtcccagtatacaccacttcgcacatttctttgtcatgtcttccggtgtagtacaacatacgatccttcacatcagcttcttttttagcatgaagttggatcagttttttcttcgcgtttgaatggtaacgaagccatttagcccaaatcttagggatatccgctgattctgattgcaacttgaggggatctatcagcatatccttttcaagttcattttgcagatcttctaatttcaaactcataacatactcaccaatttacccagttgatctataatatactatattaatttgtagtcaaatttaaattgatctaatataatatattattaaaagaataattatacatgatctaatttataaaatcaaatttatttttacttgatttcaaaaattatttgatctataataattataattaataaattttatcataaatcatttataaattcaagatctaatttaatattaattataataattattaaaagatggagtaagtttccctactccacctattgaatattatccccgttgggttatactatcaacccagtttaggaagtttgatacccacaatctgactcattttagatttgcctgagagatttacccagtcatcacctttcacaagtctttcattagcagcagtggtatacgggttaaccgataaaccgtagcgcatcagaatagcaactttaggctgtaaggattgaggatcaacagaaatcttgatcgaacctgcctgatcagcttctgtgtatggcgtatagaacagagagccaacatgatccatttcacccagatcgtacttgcaaccagtcagcaggtaatcaaacggtgtattggtgtcagtatagacataataaccgtttttaagtcgccctgtcgctaacgggtgggtttcatcggtttcatgcatccaaccagacgcagccagaacgcctacaacgcgagaagaggccaggacataggtagcttcaaatgaagtcgttctattcatttcctgccccatttcacacactaattgatacaagaaacgacctaaagccggagcatcctttgcagtgtatgcggttgtagcatcgaaaatgccgtttgtgatcacaccatcaacgttgtaacgatttgatacgttgatcagagtctgaatgatatctttgtttacttcttcactggcaacagtacccaaaacatcttcaatcacattttctgcgttgaattggtttgcttccagatcctgcataagttccacggtcatttcagttttgaatttacgggaacgaacgttgatattccaacgatccatttcgaaagaagttgtactaatatcttcgctggtttcatactgacttgttggcgcggcttcgcttgccaggcgtaatttattgctgaataatgcgaccataatcgcttcattaatatcagcacctgcgagagttacgctatcagttacttcgtatacaacatcacttgtcgggtgtttgaaaacttggcctttggtgtaggcagtaccaaccgcaccaactggaatgttatcacggcttgcatacttaccggaataggtagcagcgctggaaaacgtcatatcgcctttagggttacgataacgcacaccgaacagagttgcggtaggtaaattagtttcctgaatcgctacaagttcaccgtagatcaggttgtttaccgcacgggtaagagataccagatccggacgggtattagctacgttaattgtttctgttccggttgcctcatcaagaacctttttagacaggccaggcggtagctgtgactgacgcaccagcttgttaattgtgtaaaatttttcactcattttatgttcctgcgttattgacaaacttttctttatttatgtaataaaaaagggaaccttgcggttccctcttggaaaagttggctattacagccctttcacataaaccttgcggaagtatgcgtttttaccgaacatttctttggtaatcataccagaagtgatacggtcggacggagcctgagagcgagagttcgcaaacgggttgatacctacaccgtaacgagttttgaagcccattactggctggaagttcttcggatcagaaccacgcagcggggtcagcgcaacatacggagcgtagtagataccagcatccatttcgttatcgcctttgtaacccacggtgaagtaatcaccacgtgcatactggtcgatgtatactttatacacgccacccagaacaccagcgaatactgctttagtggtgtcaacgttcagagtcttctggagaccttgacctgccggagtgataccgctatcgatacgagccagagcggaaaccacgttacgggaagcgatgatgaagttaccagcaccacgaccagtttgacgtgcgatttcgtttgcttctttgtcgatctgaatcagcagagctttgtagctttcaccagcccaacgagcgccacgaacatcaatcggatcctggaagtcaaacgcaccagctttagagccaacggtctgagtgaaaccagttttaccaacctgtgcggtatagttgatcatgtcaacgatttcgcggttgatttccagcatgatttcggttgccagaatagcagacagttcggcgtcagcgtccataccgtgaacagcgcggagatcctgagccagttctacagagtactgtgctttcagttggcggctacgtgcttcgataacctgcttatcgatacggaagcccatttcgttccacgggttgccagtagaaccgttgaactgttcttgcagttctgctacactggtagccataccgtaagaaatttcagccagagtacctttttcctgttcggcgataacagcagcatccagagcatcggcggtagaaccagttacagtaaccggagagccagaaacgttctggaggaacacacgaccagtttcagagaaatcgtggaacacgatagcgccgtcagcgatagcagtaccggaagccagttcggtaaagccgttgctcggagccgcgccctgaccggagtacatgctatccggggagaacatcggatggaatgcttctttagcaccggaagccagcggatctttgccgtacactgcgcggagagcgaacacctgaccagtagggccagtcataggctgaacaccgcagatatcgaacgcaatcaggttaggaatcgcacggcgaaccataccgattacagcagggccgatgttggtgatagcaccgcttgagttaccagaagcgattttggttgcgtcgtaaccgtggtcaccagcaatttcagcttccgccaggaaaccaccgaaggattcaacgattttctcgtcgcggtaaaccggatcaacttctgcgtctttttcctgtgcttccataatggcagcaatcagttgttttttggatttggtagcgatatccggtaagccttcctgagactccagaagatcgttccatttttccatcaattcgtttttcttagacattgtttcttaccttttgaaattaagaaagggcttttgccgcttgtacatatttattgatcttggatttctctgccggaacactttcgactaccggaacaaagtcatctttcgtttgcggagtatttacagactcgtcaacgggtttttcagctttggttgctaccatttcaacaattgcgctgagtttattttcgaaggttgcggaatattccagcccttcaatcagagattctactttttcgacctgagattcggtcaaacctttagttttctctgaaactactgcattgcgtttcatttctgaaatttctttggtcagttcctgattagcttcaaacagggttttaacttcctgctgattctcagtcagttcgtcttccagttcggcgactacatcaacctgttcttccggaatgacaacgttatgttcaaccagaacttctttgaggcccatgatcagggattcaaacaggtcggctttgatgtcacgggaaacggcttctttgttttctttcagccattcttcggaaatgtgcgcaaaatatttatcagcatcttcgtacagcttagtttcgatttcagcggcacgttcagttacctgagcttcgaccagttcgtcggaacgttccgcgatctgggtaatgtgggattcagcgagttttgcagcgccagcttttacagcttgttcgaatacagtggtgaatgtcgctttcacgtcatcagaaagttcaactgattcgaaaatgctgtctaactcgaccggagtatccaggttctgggcttccgccagcagttgttctttaagcatttttgattttcctgttgttttgtttaatgtatttatagacctttcaaacgctcggacaatgccagaaaagcgtcatcagcactattattctcaacaagcggtttgctttgctgattttccactataggcttaacatatgcatcaggtgcgcttggcccccagacgacatcaacgcctacagctaatttaaagcccttttgtacaacgccgtagcctttgccggaatcggagagcttacctaatccacgggaagaaacaccaggaacccaaccagcacgaatcaacgccgccagtttgtcaccatcaccaccgtcgccttcaacaacaacagcgcggccccaaacatcgttacccttccaccacaatttttcaatcaggatgcaagcatttcgcggatccacattcgggcgcggagggtgattcatttcacctaatgcttgacgggtgttaacttgagttctaatataatcgttaactgcttcttcaagtacgtttttaggatacaaacgacggttacggttaaccttttcggcttgaaggaaaataccttcgatccgcaatttaccgtcttttgattccccaacagattctaaaatagattctgaaacgtcaccgcaaggtaaaccccattcttcgattaaaagcatatcgccgttttcgttgatttgggattcattcatatttatagccccagtgcagcacgtttacgcaatgctttcttgcgcttacgttgtgcgcgagtagcaattgacgggttagcacgttttgttttgagagcacgacgcgcgatctggcgacgttgggatttagttaatccggtagtctgatacgcattacgctcacgggttttcctgtctttgaggcgttctacgttgccacgggaatcaacatgcttgacaattacctcatcaagtgttaaaccttcaacaaccgccatcatagcaagggctaaatttggttcggtgaccgccaaattttcgatgattttaaccgtgccttcatcgatacccagaatatctacacgggctttcgcttcgtctaaatgttcctggagatcttcggcggtgatttcgatgtcaagttgcatttacacacctcactcatcatctttatcggatttatcatcctcggctggctttttatcgcccttttcgtcatctttatcagcgccttcgtcgtctttttctttgtcttcttcgccttcgatgcgtacagcttcggcaagttcaacgcgtaattcgtgacgaagcgcttctgtgcggtcttccatgatggagtaaaaagtttttttagcttccaccagattaccgcttttgattgcttcgataaattctttcatcaaaagttttcctcttccgcttctggatttttaaaacgttcttcttttgattcttcttctatctgtttggcttcgctttgaatttcctcatcagacatccggagaacttctttcattacgtatttatgggagatatatttgccgaccaccccttcaagttggcccatcaggtttaaacggcgttccaaaatctcaatatctttgatttcggaatagtaagaatcttgctgatatacaaaagcaatcttacttacgttttcatcccattcatcttctgtaatgattttcttcgcgatcaagttagtttttaacggatccgcaagaacagggttgaattgaatttgcaattcgcgaataaatttgctaaagttcaattcgtcgcgggtaataccgccatcgttacccaactggataccgccatcatcgcgaggcatacggcttaacggaatacgtaacgcttcatacagcttacggttaaaccatttaacatcgtcgatatcagagaaggcagtgccaccgggaagcgttgaaacttcggtaactgctttaccatcacgacgcatcagccaatagtcctctgtcattgacaggttattttgctgattcttaactttaccagtgctcgcgtcatatacaacacggttttttaagccctgtgcaatgttatttacgtactgtgtagctttagggccacccatctgacctacgtcgatatagaacacacgacgttcaggcgcacgggtaatgcggtaaatcaccatagcatcttccagcaaacgcaactggttagctggcttgacagcgcggtgcaggtagcctataatgttgttgtcgcaatcttcaaggccgctatgagcgtaaacaatcgcagagcgaggaatttttaccttgtcattgtgactataaatctgtccgttgtagctataaccgtttttcggtgcggtgtatacgaagtattcacgatatccacggaaaattttaaccccaccgggtagggtttctgtaaccgattctcggatcagttccatgcaacggggatctaactggcgcaattctttgatgccgtcagcttcatttttgtgcatgattttatggaaatagatacgcgaatcaacataccaatcacggaataaacgagatcctcggttatcgaaatcgtgaatattcattacggtatcgagttcttccatgatcttatcttggatatttttactaaaattcgttttagtaagatccatcgtaacaatatcttttccttgttcattaacaatcgcttcgttaatgatttcagaaacagcgttttccacttccggatatgtcatgataccacggtatgtatttattagctgtgttttgttctgaattcgcggatcctgtccggaatagaactgttggaacacagaagaataacgctggtttgataagtccgtttcgatttcgtgcgccccatcgttatttttcggaggcgcaatcgaacctgtatcatcttttaattgggcttcaaattccatttcatcctgtttggcgaaatttttgaaaaaccctaacacattgtctaatccaaaaaagttcatttacaactccgaaaaataatgataaggggtattgctacccctgtatttatagcgtttaaacccaccagtctagcgcgaaagtacactcaaaagtgctcacttcgttgttgctatcccagtctaaagtaacctctcccacgttggtcgggaacaggccataaatggtatgttcggcggttacttcgtcgttacggtttttctgtttaaccgtagcggtttttttgtagtttgcagggatatcccctgtaatgtcttcacccataccatgcagcatgtttgaccatgctacgattgcatcacgggttgtgtgtgcatcgtcgttatataccgtgattgtccagtcatcataggtacggtcaccagcaacgttaattttgcggttcatgtaacctaccggaactttttcaacggtagacgctggcatagtagcggctttacattttaatttaaagtttttgcccaggtacgggatctctacttcgaacaggttcggacgtgcgaaatcaccggattcaaaggcgcgtacaatatcagtaagcattttctaacctctatgtgtatttataggggcttttcagccccttacatgttatactgacgttgatccaatcaactcatcgaaatccgcaccagttgaggttgctacgaagttcagtgtgatgtagttgatagaacgtgctggtttgacgtagattgatgcaataaactcattgcgatcaataacatccggcgtgttgttcgtagtgtcacaaaccacacggtaatcgtatacaccgcccagagcgcgaacgttagacatatactgtcctgcatccatacggaaggaagaacgagtgaaatcatcgttattctcgaacagtttatatttcgcgttatcgccgatgtctttcttgatcatgttgaacaagcgacgaacgttgatacggtcaaacgggcttggaacagtcgttgcggttttatcaccgtacagaatgtatccagcaccaccagagaaaccagtaaccgcgttaatctgtacctggtacatagaatcgcgatgcgcgttagtcggttcgatagccagtttgatgcagttacgcagttgaccacggttgtagccagccggagacatccacggttgcgatacctgatcggtataaacacagaggccagccatatcacccgcgagcgggatccaacggttaacatcgttgtatttatcatactggaacttatagttaccgtcgatgaacgcataacttgaacttacgttcatgttgttatcaactggggtagtattaccgattttgtagcctgtacgccattctacgaggttatcaacggcctgagccagtgggatattaaccagagcagaacgcggcggagaaacgaatacgacgcaatctgaacgggtttcaccgatagacacagcgtgtttctgtacagtagacgaaatttcggcagtttcgccagcacaagcacccgcaatcagcagaggaacatgcagagattcacgatctgcgaacatatcccaaccagccatgagttcatcagcgcctacagtggcgtttgcagaagtaccgccgcccagttccagaacgccggagaatccgacaggccagtttagggacgtaccatacagatactgcgaaccaccgtttgcaaagaaatcatccatgtagatcgttgaaccgtagatatctttatcacccttagcggttgacacgataaacgtttcttggataataccaccacggcgaacgataaacgcgtattggttatcattctgagggccaaagttcatcgaactgcgaccgctgtttttaccagacttaccagaaggataagacttaatgacagccgaagaatcgtatgcagctttagacagaatttcaaccgttacggtgctacccatttcgccaggataaattgcaataacagacggtagctggtatttggtgcaaagttcctggaaagcagttgcctgaatagtttcttttgcagtgtcaaggttgagcagagtaatacccggatcaacttctacgccatcgattgtaatcgtagcagaaacaccagaagaactggaaacgatttctgtagtccagccactagacagatccggatatacaccaacctgtttagcgtgtgcgatgatcttagtgctcggaatgaacacagacaggattttaccctgatcatcaacgctggtaacaacaccatcttcttcaataacaacgttattgtgtttaactttgatctgatcgtctactgcatagttagaaccagcagcggtgatcgtggttttgatctgattatagatcgcggttgcgttttttgcggcttctttatcgacgacacgaacaacacgcagatcctgaccgaactgtaaaaagtttacagcgttcatgaaataatcagcggtgtcattgtctggggagccaaaatagtttaccagttcgacttcgttagaaatctgacggatctggtaagctggcccccatgaaaatttaccaacaatagcagcacgaccagttgaatttcgaacaacggtagattgtaccgatgtttctttagtttcaatgcctggagagattaaagccattattaagtttcctctaaatttatataaacgaaataccgtgttggccgacagatattgtttcgtcgccactcgttacgataacaggacataacatatcttcataaagcagttcgcgctcacgtgcgaatacctcatttgccaaccgcaaatcgtctttctcgcaaaattctgcgaatttcatttgtgttgttagccatgcaaagcaaaccagcgccataacgagatcgtcatggaaaccttcttccgcagcccacgaaacacctttttctgagaaagtacgaaattcaagtattgtctttttgttatttatgatgagtttatctttctctatcaagtcttttagggttgagcagccaatcgctttcgatcgtttactctgtttcatccccaaatcgttatagctatcacaaataacgttatcgtaatccaactcagaaaacaaagatttagccactgagtgacctgtgctatttagctcgatataaacccatgcttcgttgtacatcataagataacgtaacaggacatcaggcaaaataaggtgcgatgttttgtttgaatggtatacagcaacctgttcaaacggcatagatgtaatatctataatatgcatcgcgtgatagtcttgaccgcgcccttcggctgggtcgagtaccgcaatatatttatgtccctctactggagctttatactgatagaaattagtttccgtttcatcagtatcaacccatgatagtttagacaatttccagccagcgatcagggttccgttggttcccatgaattcagcacagtgttcctgtaaaaatgcttctttacttgaactggcgatcatcttcgaagaccatgaatagccgtcatcaaatacgccatcatcaccgtctgtatacaaacgctctttaaccgatgtccagatcgccgtgtatggcacgaagccggattttccttctatagcagcgttccagatatcatagaagtggttaagcccgttaggtgtcgttgtgataaggattttcgatttacgaccagaagaaattactggctgaatcgctaaccacgcatcaataaagtttggaataaacgcacattcgtcaatgtagatcattgcgaaggagttaccacgtaccgcatcgggagaagatgcaaacgcaccaattttacatttgttatcaagttcaatagaacctttgttccattcaacgataccaggttgcaagaaatcggggagaagttcaatcgcctgttttgtacgatccagaacttccgcagacatagaggctttatgagccaaaacgccaacatatttatcctcgttgaaacacacaaagtgtgcaaggaagatagcaacaacggttgttttacccaactggcgagacaggttacaggcaaccatacggtttttatgcatttcgatcagcatttcgcgctgatagtcacgcaactgaaccttaattgtaccatagtcaatgtgggtgatcgcgcaatatgtttcagcaaaataaacaatatcatcacgacatttaacccactccatcaacatctgttgcgtccatttcgtttggatgtacgcgcgtttcaggtttgggtttccgttatatcgagttttcttgtttcctttgtttttatacgtcgcaaagtttgaactgtcttttgcttgaatatcaactttatggataccgttaatttttaggtaatcgctaaactttgtcggataccattttttatcatgttcgctttgcgtccactccatcccaaattcatcaattttctttttcagataatcgggatgcattaatccgattgggtgatctgattccttactcggatcgatcgtcggttccatttccatcagggtttacctctaccgcttcaccattaatgaagccttctttgggttcgtatgcactaccatatttctgcattaattccgtaggggaaccaacaaatacagttgcattctctatgttcatttcattaccgccgccattacctttttcagatcctggttttgttgtttcttcggtaatttctcgcatttctttatgaattttcatcaatccctggttagaattgtttaactgattcatcagggttgtaaaaacttcaacgtgtctcggagattcagagtttttagcgttatgcaaggcaatttgtgccatatccatgatcatctgattcatgtaatgcgcggttttacgcgcaagtgcatagtcttcctctaaatcaggttttcgatctgctgggtgtgactcgacatcaacgagttcgagtttttcatacacgaccatttcttccccagtttcagcaccagggagattttcaagatcaagtagttgttttacgctaaattcttccattattggcccctcggtttaggaggttgatcaccgctaggaattgggatatcattagcatacgtttgaacgtattcttctcccgtgtaatcctgtataggcatatcaaccggatccacctgagcatcaacggattcaaaattgtctttgtccaacgggttcatattggaaaagaaatccgtgtatactgttctgatctcgcctttaatctcgttaacaggcggatacaggtagccctgtaattcaaacattaaagaccattcaatgtgtcgccgtgtcgttgtatcaccttcaaacgtggtatcaggggaaacagattgcagagatattttaatatctcggtctattttaatgtcgtttttatgtaattctgtaatacgacagttgaaatgcggctggaagtatggcagtatctgttctatgatctgaaacacatcatcttcgtaacgggtatacactcccagttcgaacatgagacgatacggagcagggttaaactgcgttactgtttttccaggtgcgcgtaactgcgtcattttttggtttaccgcgatcccagttttacgaattgcgttatactgcaaatcaacgagggatagattcatacgtggtaaaattgtttccgttttagcaacattttcctgactgtatgcatagttcagcttgttcatggatgccaggaatttttcttttgatgcgtaggtaatcggaaccttgataaatttttcttgttcgccgcgaatgcgtttaacttgcacgtgattgaaaagacaacccatcaagacaatataatttcgcaacgaactattataccaaaatccaaacattttatttttcctgtatgggttaaagcgggtataagatttctcctatacccttacatgtatagggtttcccctggttatatttatgggaactgtgcgaacggcgatccgcgcccgttgacaacatcaaacgattcaatgaattcatcgccttcatcttcaaaggcttgatcttcttcgtattgttcaatattggtatcagccaatccatcaagatttcgaataggttcgagatccagatcagcatcgggagcaaggttaatcccttcatttcgttgcagtttaggatccaattcttcaccagtatagataaatttaacgaggttgattttacgttgaggacgatcgccgaactggaagaacgggtcaaactcaatccatgtaatttcaaacaggctgttatccatagggaaataaatcaaatctcccagaacagggatcccgccatcggtttgatgtgcaaataaacgaggattgatcacaagtgtcatttcatcgtttgacatcataccaaatttgctgtaaaagtctctctgtccttcgtagtttgcatacgaatcgatgtatgctgcaattttccacgattttgtaaacttcgattcacggtcttcgcccaaaattttatcaatattaacaaattctcgacggacgtaatacatatccggagatttcatttgaattgcttcggctgttagtgaatcatgcaactgttgagtagggttatacttgtaccagttaacatacgggtttgttacttcttgtcttaggttccgatcgacgccggaaccatcttctaactgtgcaaacagactttcatcccaattttgcatttttcctccttacatcatcaacactggaagtgcatcagacagtaacagaagttcttgacggaggttttctttttcttgcatagcttcctgaatcagtcgggttccatccggagcaacaccaccaggtaattgcataccctgaaacttagccagcacctgaccgtttacctctttaacaagagcagttgcgtaatctttcacccaacggttgttatacgcagaggatgaaccctgaacgcttgtaccttgaccagccttcacaccgcctgagacagctttgtaggggttattgtatatatctgctatagttggcttatcttcgccatcagaacccgctgtagcgtatccagagacgttaccgaccatactgggtacatcaacaaaggatctgatcattgcttcgataacaacaatatcaccatctttaacggttccgtatactgcaaactgtcctgtgtcgtcgttataccagtaatccggaagcggagacaggagatcttgcattgaccgctgatagctcatcatctgggtaaaatagcccatatccgcgccatatgcgttcattccgtaggtacgtgatgcacaaccaccaccgcccagagaaccaccagtaaggcccatcaggaaatcagtaaaccacggataaaccgcagtaccatccatcgatacaagggaacccatgttagtacgcaacactttagtaattgcgaaaatgtgttctttactcagatcgaaaatatttttcgggttatccggccccagggtaagaatgatataccctttgttagatccattgtaatgatattctgcatataggtctaatgctcgttgaatgcagtcataaacctgatctgttgtcacttcgattttgacgatcggagcacctaagcggcgcagaatttcatcttttaattgtgctgggttgttcgtaatcataaagatcctcaaaaggggccgaagccccttgttaatcgttaagcgacagtgatcgccagttcatcagaaacgatgactttatggcttgcatcagttaccgttactttgtaggttccggaatcagaaggctgtagcgaatcaatggtaaatgtgttagcattagtaccaacatttacgccgttcttcgtccactgataagacagcggagaaacgccaccagtcatagttacgcttagagacaatgggtcgccagtagtatattcagtatcaccagttaggttagtaccgaatgacagaggcgggtttttgctctcataacggagatcagcgtcagcttctttgatgtacagagccagtttagcattcagatcttcgatagttacgcgatctgcaagtgcctgtgcaatgttcaacgcttctaaatcctcaacacgtttattaaggtcggcaatcagtgcataaatgcccgtttcgttaccttctgcgttatcgcctacctgagtgaacaggttgcgggttgtcgttttcaaaccagcgcgagtaacaggatcggaactaacaccatcaccatagatttctttgttaatctgctggctagttgcaacgaggccactagaagagttacctacaacgccttgcagttcccagagtgcgctagtgttggtgcgtaattcaccctcaacaacactcaaacggcctttgatactggtaggatctgaatcttcaccaacgtcaccagttaagatcgcaacttgtccctgcaatccatcatcgccggattcacccagaatcatttccatatccatcaatctgcgtttagtttccgcaatatcataacggatactaccctgagcagaagccgtaccgatttgaccgttaatggttgcaatttgtgcagtgataccagttaccggatcattgatttgtgtagccagagaactaacggagttttccagactgttcacacgatcgttaatggaactggttgaacctgacgtgcgaccgatataactattaatcgcatcaagttcattttgcattacaatagaaccatcctcaaggatcttgattcgcgcatagattgatcgggttgtggcaagaccagaatcacccatttcagcacgaagttcttttacctcttctgtcagttgtcctacttcggaaagcgcccaatcatcttccagtttggttatgcgagtttcctgcatagaaatagcacgttggttactcagtacgcggtatttaaggccagtaccagtagaagaggggtcaacatcaccatcaacgttaaatccaggatatgaaccaacttctttcttaatgtaaatgatatcattacgaattgtgcggtgtttaggatctttttctggatcgtattcaccaatttcatcgttttgagcatttacagaaagggttaactgtgctaccttgttctgtgtttgggtgttagataaagttaatgcccgaacatcctgatccaactggttaacttttttgattacgctctcatcaccaatagcatcaatgttttcagtaatcaagttaacctgatcgattacttcgttgattttatcattatgggtgatggtattttgttctaactgaaccgcgttctgctggatgtttacaccagttcggttaagactaccagtgtttgacactttatctggcgaaccgtccagagtttcaccgtttttgatccaaataatcttcgtttgagtcgtggcgtcatctgggacgccatcaacaaacgggatcttcggcaacgggtttaatttgtcgatgatcatttaataacctctattgagtacgaattacgtagtttaatgcgatgtttttcatgcgggtttcttccccacccacaccagtggctttagttatagaagcatcaaatacgcgagcgctttggtcattcttttcggcgcttttcagttcgtaaactgcttgccatttaggaatattaccgccgttctggtagataagctgtaatgggtgttcatgccagcccaacatatcgccttcatatgtaccatacccacgattagggtttagtccacgcccacggtcatgaccacgtactgcaacgcctcgacaatctggaaggttaaaccaatcaccgccaccaccaaatgtataacctatacgctcaaaaagtaacggatagttatttttattcagtgagcgaccatcacaaatatacaaactaccgtggtcagtctgaaaaccagtcatgacaatagcacctactgggaaatgccaatcaagatctgtccacgtctgatatttgttgttatatattgcgctattctcataaagagaaccgttaattaccgcatttcgatcactaggtaataccgcagcgtttgaagaaagtgcagtgtttgccacataaccaacagttgttgctaatttgacaacaccgaactgagatccagttgcacgggtattgattaattttttcgcagtaatcgctttggtgtcatcagtacccgcgtttgcttctgcttgtgttgcaatacgaataacacccaggttgctttcatttgcagttaaacgaataaacgtataaggtgaaattgcatacccttcacggatcgtaccagcctgaacctgtgcaactgttgccagttgtaccaaaccttgcgagctttcggtcgcacttgactgaacaggaaccagagacgcgattgcttgcttgactttaagcggagtcatagttacagtgttatctgtaccagcaaccgcctgtgcagtggtagcaattttagaagaaccccaaaccgattctgtacctttgcggttattgaacacatagttcagagatcgcggagtaatagacgatgcatcgttagttacggttgtggattccgcatcagtcgaatacttcgtataaccccatacggtttgtgatgctttagggttctgcatacgatatgctaacagtttcggagtaacaatcttagtgttatccgtgccagcgtcaatatcagcttcggttgcgatctgagcaataccacgaacagaagttgttgcgataggaagcccagtatcagtacgcgcccaactacctattttttccaacgcatcttgtacgttggttatggtatcaggccaatcagtacctgttgggtcaaatgtcacgtaaatggatttatcacttacgtggttgattgtattgttactcatgtgttatccttatgcaattcgtttgaagtaatacacggttacttgcggagtaacatcaggtaagaaaccagaacccaacttaacccatgaaccatagccactttttgcggctacgtcgatagttccgatttgacgaataccgttttctgagatatttgttgccgggtgcggaacactatcaataaatcgacattcaaggatcgtaccatcaacacctttgcggttaacttctgcgaaatatttttccgctgcaacgaattcagtaaatttgttgtatgccgtttcacaaacagttgcggcgttagtcccattatcaaagatgaaaggaaagccgtacacgtgaactacagcctgttcttggtctgaatcgatgttctgtacaataccatcaaaagaaacgctctcaacctgctgtacagcgattggaggggcatcctcagtcatggtaacaacgccgttaatcgggatttgctcgataagcgtatacaggtcatcaattgcggattgtacgtttccatacagaacaccgcgttttgtttggtcaatgtttggttcgccgatcgaacgtttaccgccgatcagaggcaacttaccataagtatcatactgtaagtaatctgcttctttagagaggacgcgagcgccctcccttgtttttgaaatattgttgtaagccattatgcaacccttatccagcgatgtgcagtcatatacggtggaatagttttgattttatcaggtaatgtgttaccatgattcactttcaatgtatcctcacggtatttagtgtatccagggccagaagcatcaggatctaactgacaaccaccaatgatcacagcaccattttcatcagcaatcagaactttatcttttgatacaagttcaggaacgttgatgattttgatttctgtaccacgatcaccgcctgtaccacctgccgtatgactcggttgaccaccactatctaaatcattattgtttaatgcgaaatcaggatccgctgcatttgatgtccagccagccaggaaataaccttctgcgtaacgtttccaaccaccaaatcccatataatcagcagggtttgccgggttgtgtgcgttttcatagatggttccgatcgggtggataatatcaaacatagcctgaatatccagaatacgtccctgataggtttcccctgtattacgcattgttttctgagaagggttattataatcggtatattcgatacggttcgtcaatataacttcttcttcgttattgagataaaccttatcagctttttctttaataccgccagttccttcccaatccatcagagtaccaatatcattgttaaaccaacggatcgttacaacgtcgccggattccagttcctgagcaaacttgattgaagtcactacagaatcagtgaatactaaactataatcctgtcctgacggaacccatacaccagagttaccaacacacgtactttcatcaacaccttccgcaccttcacaggaaaacgccggatagtcagcgtcaccgcctttaaccagttgtttaccgttgagaagcagttcaaacgagttagggttaatcaacacgcgagggttaacaccaaattcagcaggtgtaaactcttttttggttgccagatcacctacccactgttcaccaggaacggtttccagagaagtatcaccagtctgatacatgcgcatcacatacgcttcatagctcgaacgccatgttgctaacccatctagataggtaacaaattgaagcgtgtcaccagcgttacacgggtttttaagacgtactgaattaccatcaagtgcaaccagttcaccaggagcagaaccaatcgatccatagtctgagttatcagcattgaatccgtctttctcatcgatgaaaagcaagttaccgcgatagtaaacttcgaacgattgcaggttgtattcattaccaacaccgaatacgttagggaagtcagtttgtccctgagtagcaatatacgtttcttttgctactgttgccagatccgaagttgtgattttgtcaatctgtttgttttcgacgtattcccaacggcccggagaacaatacaccaattccacatccataaaatctttaaacaaatctttaggagttggggaacctttgatagtatcaccagttgcggggatcagtctaacgttgttggtagcccaacgcgaccacacatcacgcagacgaataactttgttatagtcgcctacgccacctttcgggaggtttacggtgattttgtttgcactggtattcaacgcccatgattcaccaaattttggtgatagcgtcgtacccgcaaaggttttccaggcacctgctggatgggggatctcaccatcccccagcatgttatacaattctgtaaagttgttgttagtcttttgaccacctcgacgcaggtaatcgcctgtaccatcgtctacaacctgacctattaaaatttcttgtttcatgacgcgatccctgatttaatcgtatcgattgctttaatcgtgaatttaattcgatcttctttgatcgcttgcacgttagcgtatacgacatcaccagcaccgacagtaaagtttaatgtaaacatttcatcttcactgtttttcaaaatagcatattccgttgaataaatcgttttgtttacacgatccacggtcattaaaacttccgccattttggtaactgtaccagctacgttttctgcgtatacgagcaccttagccccgctaaattcgctatatccgaacataggaatagcagtcgggtttgctttcagtacaagcgccgtagtgtcaacaggcatcgttttagaaccgaacatagattctacagaataatcccatgttgtgatcgcaccttcttttttggtacaccagatttttacaaaggtgtaaggtgacgtgatgtacaactggtctgcaacccccgcgattgtatcgccaacttgaggacgaaacgcgataggacgatcaacagagacactacccgtactatttatgaagtagcaaccttcgccaaccttaccagaaggaagaacaacggtaatcgaacctgttgaagtatccatgtcatgcagggaacccagttcgatcggtgtacttgaatagtaagtgcgtggtaatttctgatagtatccggtagcatggatcaccatgttaccgacaccttcgtttgcagacagcatacgcacatcaccaaacgcattataaacgttggtgatcatttcgttcagtttaacaccaccatcataaagcggatcgcctgttgatgggttgccgatttcaccgacatcaattagtttttttgctgtttggtaagccattgtttttccttagaattcgaatacaatactcacttcctcagtctgatcaagggagcgaataataggttgtctgttttccatgtaaatcatacgtccggaatcaggttcaagcgcgttagcattatagtaatcaccagttgctttcttttcaggttcggtcgggcttgcctttttaatcaacgggtttacaataatacttatctgacggaaccctttgttaccagggagcgtagattgcgggaagaaaagagaatccatgtacgcacgaaaacgcattgaattcacctttaaccgatacactagatcgtattgtcctggataccattgaatcacgttatcataaccccaacgtaccggatcctcttccagttcgccagggaaaggaactacgatatgttcgttcgtacagcggttgatcacgacatctggcgggattgtgtagaggtattcccatttatagccgtcgcccatgtcgatcccgttagcttctccgcgtggaggttcactcgattcatgagacggactccagataccgccgatcctgatacattcaagttttccggtaatgctcgaaatggagcaagaaccgatatcaggaacatcaactacacgataaaccatccaacctttacccggatcagtacggttataaggcgcggtgtttacaacaacaatatcgttaaagtaaaagattttcgggtttggatagcgagtatcaccccagtctttacgtggtaaaattgcatctatcatatcaccaggaactttagtagccccgatcatatgcgtccacatatcactaacaccatcggtgctatcatttggatatggcggggcaaagttagggtcggattcgttatccgcccatgattcagttcgcccaatagacatataaatcgtgtttagatcggcggcatcgccgatcatatctttgaagttcatcaagttttcggttcggaattttgcagtaattaccgaccgatacaagttttgttgtgccatttaatttcctaccttaatctgtgatggaggatttggatcacgtgggtttcctgcatcatctttcagtcgtctatccaccaaattacggaactgtgaatatttaacgcctgagcaatcgaacaacggactttgatcgaaccgtcgcgcagaaggaagaacaccgttaagcggtttttcttcaacgtcatattccggaggtacatcaaaaggttcccccgctcgcgggtgtgcggtgtacagaggttcaccagtaaccaggtcgaattgttggtttccgttaccgtccatgctcgcaatgcgatcaggccagaacttaggataaccactatcgaaacggtagtttctcagaatatcaatgattgtctcgttatgagtcattgacaaaccagagttgatgaatactgttaacatcgtaatacccatgaagccgaatcctaccggatgaacaaacctcaatacgtcatccttataacgggaagtcggtagatttgaacgaattttcatcacgtagtaagagcgtccacggtttatatagtcgatcgagttgttagccatttgtttaccacgaacaccacgaattaccattccggtgaaattggttttttctgacttgacaacctgcccttcgataaagttaccttgagcattatgcagagtcattgaccaacgcaattgaccattttcatattcacgttcgatgtatgtaacgttagcgcgtccagttggtgtatagatcgtccggcctacgatatcctgactgatatttgttgaactaaccaaaatatcatattcgagactgttggagctttcgatctcaacggaaacatcttcgttatacagtaatttaaacaggaacgtataacttgcctcaatcccttttgttgaatagaaatcgcttgcacgtgattcaaaaaatctaaccactgcctcacgtttggttttatccaggtaaatgttacggcggttaatttcagaccacaaatattcaacgttgtttttctctctcggatatttgttccggatgaggttcagcaatttgttatagtaactgttgctacccaacgaaatatattgcagatagtattcaccaaatttttcgaactgttggttgtccagatagctttgcggagcaaaacgagtaatcatgtgactcagatcaggatctattagtccaggttcaatatccggcgtgtatgggttttcacgttcctgattaaccagacttgccaccattaaagtgttatcaggtttccagaaaatagtaagttcatcccttgcgcggtatgacagttcatagaatccaattatcctaccacctgagcgatacaacagaacaccgtttgtgtacttcgtaaaaccagtaaatttgatattattcaagtagatagtaactgttcctttgtcccaaacttcatggtttacacgaatcgttgacgcaggagacgcgctatcagtaaccagagtatacagggtttccggataaaccaccagaggacggttatcattggtgatccatgtgctaacattatcgcggaaatgccagctaaagtttgcttcattgtagtactcttgcggcccaaagttccaaacagtaggatcgttctgatttgctcgaactgtagcaaagttaatcgaaatgctcgcagtataaccaggaacaagatcgtatttcaccgctgaatgcacatcttccggatacttttcaaccagatctggatctggcaaagtgcctggatatttgtagttaccaacagaaatgtaaacttcatcgccattggttgacatatttgtatattcatgagtgatataaaaacgttcatcttcggttttaccataaacacgggtaaacgtctttgcattctcatcccacagataaacgccagcatcgtttgatgggatcacgttagctttgacagttggatccatcatcgccgttttaacttcaccagttaccagaacgtacagacgatcattcagcacatccatttttttaacaacaattttatcatttcctggtacgatagtatatgaaacttcatcaaaaatacgttcaccaaaggtcggcgaaccaggatcagtatcaattggtgtgttacgtaacgcaatacggcgcataacgttcttagcagccacatagagccaatcactagaacaagccatagcttcggcatacttcgacactccgcccggtagacgcgcatacgtgttgtatgagtcaacatcaaaatctaaccctgactggttccccagcttcgcaaaagttacatcatcagaagaaaaacgaacttcatcagaagaccaacgaatatctgttgacgtgcgcccgtaaaatatgcgatcgtatcctaacacatacgtagtgttagtgctctgataagcaatggtacgggaaaccggattgcctacacgatcgtttaatgctttgtagtaataccacgtttggcctttgtcatttgacactttagccatattctgaaaacgttcaaacaggtaaagcaatccgtttgagtataccaggaacgtgcgatctatatcattacaaacgtgttcgatgtgatcttgaatttcatggtagctttcttgtttcaggatcttatcgctgatctggcttacatcagaatacaggggagagtatacaaaatcctcaaccatcagagaagccataataacatcatcgttaaaatcgacgtaatcacgattgtttttggcgaatttttcattgataaacgaatcagcaggggtgaattcacgcatggttgtatatgcgtaggcgttctcatcaaacgtccataattcatcgctgatcacccaatcagaaggttcaaacccttcatgagttgtttgaatacggaatttataacgtgtatttggggcaacctgatcgctaaaccattcgttttcgtagctataacccaactgcgtccagattaactcttcgtctggaataatagttccgtccatatcacggctacgggccaattcaaccacataatagaaatccatgccaacatcatcccatttaaggtaaacgaagttagcagccagtttatcaacgcgcaaactcgtaatcgaaggcgctttaatcattatatttctccaaatttgcggttatgtatatcacgtatttataaaaagaaaaacccctatccgaagacaggggttaaagattattgactgataggattcatagtcaatgtggtatattgaggacgcaggtcattttcaaacacgatcaacgaaccatcgcgagtaaaaatggtttcttcgagaggttttgcagttagctcgatataagcagcgctgaaactatcggcggatacgttcagaacgcccaggtcaaagctaatgaaatcggtgtaatgagaaaccgatccaacttcgtaatatttattacgggttcctgcatctgttaatttttcaaagtcatcgcctgtataagcagcgatcgaaatatccccatccttgaacgggcctattacaatttttgcgttaccatcctgatccattgccgtagaagcataacgaacatcataactttcgtcatcttcgttggtgaacttgaacgtactggaaatgattgatttagattccacctggttcaagaaatggatcccagacataggggcgctgtaatagttgtcaatttcacggagcaatttaatatttgcttccgaaccaataatagaagtatcagactgatcgacataagtcaacatcttagatacactgaaagatttgttgaaaatttcaacgttgtcagtatagtaagagtcgatcgacgaaataacctgaccgcgtaaccattcctctgattccgtcaacttactgatatcatacgttactttgacagattgcacaatatacagatagttaggatccataatcgacggggtgatcgtcgcgaggttatatttcgaaagatacgtttgcatatcttctttctgtaccgatgttaggcgcaaacctgactttggtttaacagaaatgaaagcataaccaggtttttcgttatcagtaaagcactgtaccgcctggatgatagaaccaaatctgtgagacaggaaagattcataatccgatgcagttacacaacggcgttgtgtttcacgcataacaggggccagttctcgaatacgctcgatatcttctggatcaccaccaccatcagcaccgacataatcaggggatttagtcgggttttcttcgatgttagtgatgctaatattggttaatgtatcgacatagataaaatcttttgcaccgttagccgcttccccatcggttgacaggtattcaataacgatagtcgatccattagcaggtttcaagcccccgatatattcagcggttaatgcaccacccgccacttgttgacttgcttcaccttcaccgaaataaacttcggtatgtccatcaacagtttcacgcatgtagtaaatcgtgcttgcgcctgttgcgtttacaatgctttcgtttgtccagtcttcccattgtgcgccgtttacagttaaacgtacctgactacggtcaatgtttggatctcggatcaggatacttgaaccgtcataaattagttcagtacgaactaaacggccttgcaccaggttcagcattgatgtatagttgttattactatcacgaacgataacaacgtcatccgatacaacaaaagaataactgtctgtattctttacagtaccgatgaattttgtaccgcgcgggatacggatcgatgttggggtcagtgggttagcagccgtaatcattactgctgtgcttgcagccgtgcgcgaatctggcatataccccagttcttgagcagactgtacaacagaactacgcaatgcagccgtgcgaataaacgattcaaatagagccgtgttacccatctgctgaatataaagagtagcatacgacagaaggtcgatcagtacgttcattcgtgagccggaaaaatcgtaatccttaaactcttcttgtccacccagccaatcgatcagatctgttttaatttcttcgaaagtacccccgataaaaatatcggggatttggttaatctgttttttgacagtcttagtcttagcagtagccattattataaattcctcttgatcattcgactatttagtatttcagtactggaacacatacactaatcgaaccaaagttgattgctaatcctatgagagacagcaatttattcacatattgtgtgactttactcaacgccagcgtacaaatttggttgtagattactttgcagtgatctttaaacgagcgcgaactatcaatgaaatttttgtacagagactgagcaccagtaatcgcattttcatatgacttgagaagatcgtcaaatgcgacaccacagaagcctaaaaactcgtttattgtactcatcaaaggcaatttctttaattcttccatcgccatactgtatgtatctttcattgcatcttgtagagatccaatctgttcctgtatagcgtcatacgcggcctgtgttgcagctacagcagcgtttgcaacatccaatgcagattgataagccgctgttgcttcgtctgttacagcgccccacatccagtttaagtactggttgaattttctctgaattgcatcacgttcgaaaatctgattttttaacgttttgtaaagttcctgcccttgttcataaagccctcggatctgttcgtatgactcatcaacaaaagccttgactttttcctgtgcttgttgatataaatccattgcagtaaatccagggaagttaccgcccagaattatatcaagtggtttgatttgcatcatgatgttacggatagccagcaccgcagaccataacgggtttggaacttccggagggatagcccatgtttgcatgatccgaccgtataagtcgattaatgcaacgcaaccgttttggaacatcgttaaacaccaatcaaataacgcgctacacgcatccacaaggtcgcgagcgccagctttgacatattccacagagtaattgtatgcgcttcctatggccccgtatattgcgtttatgacggtttcatatgtttgttgtccggatttgatgattgcattaaacgcatctttcaaagtctgaacagaattatcaccaaacaccagatcgtaaatgttgatcgcaacacctaagatggttacttgaggcaagaactgattaatcaatccccatgcaccaccgataatgttaaatgcagcgctaatcacttgtctgaaaactttcatagcagtttgccatgcttgctgtgacaatgcgagcgcccccgccattacttcttccatcgatacggataaaccatcaaacatcgtcgcgatcccgaatccattctgtacagcacccgttaacatgttaaactgtagcttgaacgtattacgggtttcgttccatgcctgtaacatagcatcactgatatttgtatatgcgaaaccaacagttgccggaatgcacgaaatatcagcacggcttaattcactcggtaatgctccataagtggaaggcattgcaggaggaacaggaggaatgcttgtatctgcgttggtgttaacctgcatacccgtatatttgcactggtgcgcccctgtttcgtcatgcttcatatatgctatacgattaccattccaataataatcaatattggtgaatgcgccagtgtcctgattatacgcctgacgtatgcgagcatcacatacagggtttgttccggaaagatacccgccactgttttcaaccttatacatagccagttcgccagggtttttgtataggtttgattttgacagatccgcgccgtaccaatcattaccaccattgattttagttgcaccgatggatgtaatgtaagcatcaatctctgcttgagtgttgaaataatagccaatcttcggaacaaggatccctgttggttgtccggtatttggatctgttcccggtgaattgacaacaggtagatccgtgcttctatgtccgaacggttcttgagtataaagatgagtaccgattttgattatctcggtatcccactcaaccccaacagccggataattttctgtatgcccttgccagataacccgccgataatagccagcggggatctcagcatcacaaggatgctgataattttgcataattccatcaattattgattcataatccataatcatttaattaccccacttggacggtgccgccagtgatttttgttaatgcgccagaatcaataaacgtgttattcgttgctttgatattgatatctttagcaccgatatccatcgtttcttcaatctccattttcgcattttttgcagtgatcgttgcgtcttctgttacagctacggttgcattctgtttcacatttgcggtaagattctgatcaacgttaactgttgcatctttgtttacagttagttcagcgttacctttaatcaggccaacgtactcaccttcaacagtttgttgaacgttgccacgaacaaactcagttacgttaccatcaaccgtttgttgaacgttacccatgttgtaaatgaatgcgtcgccttcaataactacctgcaagttgcctttaacattgagtttccggccctgcatcacgatctgataatcatcccctacgattttaacaacgcgggttccatccgggcgaatttcttcgtaactccctgctgggtgaacacggttatatcgttcgtatcctggggtatcatcgaattcctgaatgtgtccggatctcgattcaaaaaccatattgtacggatattccgcattataagatgatgctggttcttcaaacatcacacgggtatcaccaggagtaaacggatcttccggactagtagccgacaatgtagcaccgttatacgcagcgtaagcagcactcagagagcgcccttccggatctggtacttgcaccccatatgattcaaggttgcccgtgaggacgattttagacacgcgagaagaacggcctggagtttgactagcccacagtgaatttcgaagaccattataagccgcttgccaatcttcatttttcatcgcttttagggtattggtgaatttagcaacaccaccgacgcccatttgaaacgacatgttttcgatcgccatttgacgaggacggtttaggttcacatacacttcacggacgttagcggttctctgaatatcagatcttactttggctaaatcttgagcaaataaggttgatacctcttctgccgtgattgtcccgtttgttacttctcgacctactgctttactgatcgcagcgttaatttttgcagtgtcgcgagtcttttcgcggataagcaaatgcccgatcccgattgtcggatatccttcactgtctgtataccatcgtgtgcggatcccctcatcctgcttgagcatcttttcgatcgtaaatccgccagtatcagggcggttatcttctggtatctcatccagtgggcgatcgtctgggtttactgctatgcttgtgtttgaatcacgaatgatgacacttgatgatcctttgcctttcaaaccacctaatgcaagggagttaacatcgttaccaacatagcgagggtattcacccataggatcgcaaaaacctttctgtgtgtctggttgttcgacatattcaccagcgacagtaccgattatcataccatcttggtgccatttgtcacgccaataaccaacaacaaaggatccgcgagtgataccagttggagagaagcccacaccagagatcgcagcgcttctaatatcctgaataggcatcatccagggtaaatcttcaacaggaacaccgattgcatcggatttttgtttttgggctgggtgttgtccaaatacacggacttgaacacggcccaacccgcgaggatcatcaacgttttcaaccaccccatcaaagaaaggtgagtgtaaatttccgcctaatttcatgagttagccttttccatttctttaataaaatcattcagaaacgcctggatgtcagacggactaatgatttttattgttcgttttgcttcattttgcaacactgcatcttcataaatatctacaggagctaatacaccttgatactgtaaatacagcattggtttgtcacctttatcataccaatgaccagggttattggggtcttctacaaggttataatacttgttgttgttttcatctacgtgatacagaacctgttcaccgccaacctcagaataacgctgtatagcgcactgatacgcggcttcctgatcggagatccaaccatagaaagggtcataaacagagttaagcatcaacaggatccagtagtattgctggtttccatataatgattctgcaagttgttcaggtcgtagtgtgcctgttatctggtaactacgggttttatattttccaatcacacgattaaaataaaatcgatagtctcggaaaatatcagttgtctgggtgcctttgtaatcaacaggcgggaagtatgaaaatagcacgataagttcccctatctaaacgttatattattctatttaggatttacgcaatggctggaagacagacgtataaagggtcgtttgtacccgaaaacatacagaagtataaaggcgatccgcgaaagattacgtataggtcatcgtgggagcgctacgttatgaagtggctggataaaaacccacacgtaaaacgttggaattctgaatgtatagtgatcccgtatttctgcaatgcagacggtaagagaagacgctattacatggatttctatgtggaaatggaaaatggtactacatatctttgggaggttaagccccttaaagaaaccatgcctccaccgaagccagtaaacaacaacgtacacaataaaaagaaatttattgatgctctttacacctatacagttaatattgataagtggaaagccgcaaatgagctatgccgtcaaaaaggctggcagttcaaaatcgtaacagaagaatcactcaaaaaagtttttgggtggcgaggtcagtaatccctggagggaaacatgagttttatttttgagtttgagatcatcgcggaagaggataaacccaaagcaccacccaaacgcaaattgagtgattgggttgaactggggatcaaattccgtaaggcaagaacgaaaggtgtttctgctaaacgttttgccgattctgagggattaaactacgcaacgttcacaaagtcaatgcatcgttacaaaaaacagattgatgatgagattgaacgacgttccgcagagacagaagcccgtaaaaaacgtaatgactaccgtaaaaaacacgggatcgagatcatcaacgatttccgtaatagtctgaaaaagatcactgttggtgtatcagcggcaaagcgacagaaagattcaacagaatggtttggtaatttcatcaaaaccagtatcaaaacacaccgtgtggcaaaaccagcaacgggtcgcctgtacacgtttgcatatgatgcaaaatataaagacaccctgccgtattgggatagatttccactgatcattttcttaggatccggaagatcgaaagcgggtaacttagtgttctatggtttgaacttgcactatgcgccacccagagcacgacaggagtttttagaagagttattgaagcgtgggtacggatccaccaaacgcctctctaacaagaccgtgcttaaaattaactggggtaacgtgaaaggtatgcgaggcgcaacagaaatgatcaaagcatatctaccatcacacctcaaatcaccattagcagagattgccccaaaagactgggcgaaagctgtttggctaccgactcagcaatttatgtccaaagggaaaccttacggcgcgaaaaaagtctggagcaaatactaatcaaaaagccccaaccgaaaggaaggggctttatttttacaggatgctaactatttctgcaagtttgccaggggtcgcaccaggtctaactttcatagcatctttcaggtttttgtcaaccatcttttctgcatctttttcgttaaacccgcgtttcaccatcacagcaataactttttcgcgaatgcctttagccgcttcattcagatcttcggattcagccagaactagtttagaaaccatatcgcctttatattcctgggtgaattttttaccagataccaggcgaggtttgccggaagcatcgactacggtaaacactgcatattcaccgcttgctttagttttagaacgcccagtgtacagaagacgcatatcgttgcttgggagtttgtaaactttacctttcaccagagcttcatccatagggatctcgatttcgaaatcttctgctaactggttatacagatccagattttcttccgcctcttcatacagagtagcagctttgaatttttctggtttgtcgaaatccagatcatcatccggattgccactgtagaaagaaacagtacctttagcccaatcgacataagccgcttgaactttaccagtagtcatacctttcaaacgtacaatgtttttaccgaagtatgccagatcgtgagaatccggtgctaaaacttcgaagtcagaaccatgtttgaagtgaagaaaaccgattgaatgtttatcggaagttttagcgcgttgaccacgtgctacggtacgagcgagggttttaccttcggtcagaaattctttgaattttttcaagtgagtcattttgtttttcctgatttccaatatgggaacatagtaccagtatttagtgacggggtaaaggaaaagttttcagaaaaagcataaaatttattagatctaagtattgatcttcataaaaatttatgataaaataaaatattaatatattatagatcataaaatttatgaattcaagatcagatctaaaaatttttgataaattatttattaaattttacttgatcttgttagatctttttgataaaattttaattaataattattatagatcaaagattttaaaaggtcaagcattttcttcaaatttttatattaccccgtcaggccgctttgatcccgttccccgctaaatagaggaaaggagatcctatgtctacagaaatgattttaaaccaaatctcacctacaaactttcgggttgatattcctgataacagttacatgaaaggtttgactttacaagttcaaggggttacactaccatcaatgaacctcccagcagttgatattcctgcaaatatgatggttcgaggtaaagtacctggttcggcttttgagtttgatcctttgatgatccgctttgtagtcgatgaggaaatgagatcgtatcttgggatttacatatggatgttgagcacaaacgattacaatgagtttaactctgttgcgtgggatgatcctaagcaatcattcgctgtgcatatcctggataactcccagatgaaaacgatcgccacatttagattttatggtgccttcccaacaaacttgggtgaggttgaattgggttatactaacgatagtgatgaagcggttacgtgtatggcaacttttggcttccttcatatggaagttgaaattgacggaaaagtagtcacttctcaaaagagaatgagctaatgatttatgtgattagtggaaaaaagcgaactggtaaagatacggttgctaaatttattcaagaggcgtacaatgatgttcagtgtgaagcactggcatttggtatcaaaagaacgctaagaatagcaatgcagcgatatggttacgataaaccatacattcgcaatatgattgaaggacaatattctgatccggatgctattttttacaaaggcgatcgagagaaacctcttgtgatgtctaatgaagatgttctaaatattttcaaaatcgggcttgaaatcctcaaagaacgtggatacaatattgtttatagtcctgatgatattgataacctgattatgagtaacgatactccctggagtatcagacgcttgatgcaagtgtttggaactgatatcgtatgcaagtatgataacacggtttgggttcgttacacgttggaaagattcgtcaataaatatactggtgacgaatacaaccatcttctggtcactgactgtcgtcaagaacacgaatataaatacctgaaacgcttgggtgctaagtttgtgtttattgtaaaggataccggaattgttgatgaacattccacggaaaaaggtttgacacctcaaccgggagatagtatcatcactaacgaaggtactttgaaacaactaaagagcaaagtgctcgatacttttaaattttaacaatgggtaataaaatgtctgatattcaaaaactgcaaaatgaagtactggtactgaaaggccgcgcattcgatctgaacgaagtaatcgcgcaaaaagaaagtgaactctctgttcatcgtcaacttctgtccgacctgtgttcggtactgggtattgacgcaagccatccagtaaccccagaagcagtgattggcgcggtatccgctctgatcccttccgttgaagtcgaaaaaggcgcggaagatgaagccgcctttggcgaagaagcgtaaaaacaaatttattacaaaggggcttcggccccttttttattggggtattttatgaaatcatttcttgaaatcacaaaacctgttgtagatcctggtatctacatgtgtgctaaattcgatcaggcttcatgtgaggctttgaaaaatgttcaaaagacattaggtatcacaaagaatgctgtttcagccgaaaagatgcatacaacgatcgtatacagccggaaaacggttgatttgttcccgcaacaggacatcacagaacctgctaaactggttgatgttgaaaagtgggacacaaaatacggtagcactattgtagggatcctggaatctgaatacctgcatagccgtttcaaagattctattgatgctggcgcaacatacgattatccggattacaagccgcacgtaacccttgcatacgattcgatgcttgatgatatcagcggagtgaaaaggttgttgacactgcccgtggatttgactattatctgtgaagaggctgaatcactggatctggataagtcgttaaaagatattacagaacacattgaacagcgtggcgataagtgggttgttttgaatcacgatcgcacaaaagaacttggtgaatacgattcgaaagccgccgctgaaaagcgtttgcgtcagatcgaatacttcaaaaatcagtgaggattatatgaacagaacacgtttaatgtatcttgttaacagtgtacgaaaagaagttagcgaggcgtttactagcgcgttaggtgactggtatacaatcaaggtagcggctactgctgaccacatttcagatcgctttaaagaccgttcagtatcgattaaaaaagatattgaaacttatcgcgatatcatgatgagtctagcaaatcattattcgtgttatgttctaacctacgctgtgaaggccaaaacagaagggacacaggaagttattgtttatcgtcgggtaaatggtaaaatctttgcttgtcctatcactgttcaaatgttctttaacgaaggcgaagagaagccagtgatcgctatacggttacgaacggtgatccctgagtatgtttctttagctaacagaaaaacaatccaggtcaactacgttccaccaaaaattaattttgaatacgacggttatcgtcgggttatgtcccgcttggatcgtctaatcgcttctaaagattgtcctccgcaactttggatgttgaaaaattgaaaaaagcccttgcattagtgcaggggctttgttatattggccttgtcgaaacaaaggaggctatcatgaaactttactggttaattttctcaaacgggtttgttatgaaaggaagtgttcattgcgcaaaaacttattgtgaatggaacaattgcactttcaagatcctgagtgttgcggcgtctcaacctgtaggggattactaatgactggtgataagtgggttgataaaactttgttgttgactttggtttatattatggtaagatacttaatatagaaaaaggaggatatcatgagaaacttaatgaacatcgcagaactcatcgcatacggcagctcactctatgttttggcgcacggtgacggaaaaggttacttaattttctttggtatcggccttgctatctctttcatcaaaaaattctttaagtgagaaatatattatggctaaaccatccggcaaaaaatataacgtcattgatgtttatagaatgactttaaaagactttgaaaacatgtgtcgggcttatggtagttctaccacccttcgcgaactggcagagtctgctaaaaaagaacgtcctcatgtttgcccgaaatgcaacggaaaaggttatgaaaccattcgttataacgcatatccgtctgggttgccagattctggatgggtcgaagatatgaaagatttcaacaaagaatgtgacctgtgtaatggtcatgggcgcaccaaagataaatttgttgcaaaacctgttaaagtggaatatgtaaaatcatgaaaatcgtcgatttgattaaaatggctaatggccttgtaacaagcgatcattatgccgactattgcgaacagtatgaggtgccactgcaacgcgcgatcaatcaatccgggtatgatggtgttagcgaaatcaccaccgaaaacctgaaaacattcatcgtgtttgctaacaccttctggatgtatctaccggataatcctggtattcgtcaacctgcattctttacgctttgcaccttctgtgaaacgtatttgcctgattgtgaggatttcgaagaaatctatggctaaagtagagttgatgtatcttgataaaccaactggatctgttttcccttgtgggtttgctgatagtgcagaacaaatgatgtctatcgcgttttctcccagcatgaagccgatccctggtttagatgaaaatgtaatgaatgagtgtaaccagaacggaaaagtatggtatactcgacacgaagggaatgttgtttatcactccaccctcgaaaaccttaaatctgaaataggctatacaaaatgaatattgaacatgtatttgcacaggcattagagcagaaattaaacgcagaactcgatctgtaccgttatgacatggaagaacagattcgcggtgatcacaaaaacagtctggaacatgaatccagtcgccgcgaagtgtggaaacatactttctttgaaaatctccaggctggtgtgacaaaagccagtgctcgcgctaacaacgcacttgaagcatttgataacgcttttgcaggtgaataaatggaactatcagcgggtattatctttgttaaagatggtgccgtgttgatgggccatgccactgaaacgccccattgggatattccgaaggggcatgttgaaaagagcgaaactcatattgacgcggcgatccgcgaatgcttcgaagaaacaggatttgaagtgttcgcggaggaattggttagcctgggtgttctcgattacacgaaaacaaaaaaccttgctttattcctctatgtagggcaagattacccagtagcggaagaatgctattgtgcatcaactttcgttaagaacggacggactatacgtgaaatggatgattttaaatatgtcccgatctcacagattccgtcacatgcacgtaaaacgatggggcaactactgcctaaaattttagcaagatgagaaatatatcatggaaaatcaactgactttaatcgatatctgcaaatcaattcgcgatgctgttttaaccaaagcatccgaagtcactatttactcttcatggagtgctgaattcggctatgaagaaattgtaaacttccccgaccgcctcaaaaataccaaatggttccgttatatcgatcctaatgagctttcccttgatgaactggaagaactcaatttcagtcgctgggatgaacatagcggcctacgcctgatccctttgtggttgcttccatacatcgatccggaagcaaaggtcatctgcattgatggtaacgaagttctgtttaaagatgcagataatgatcatcgttttggtatgttggcctacggtgtgaaaccaaaggcataatatgaaatacgtcgattttaatactctatctgaaatgggccttgtttggcgcattaaccgcgaaatcttacaccctctggggcttgcgctttcccgtgatgtagaaacaggttcatcacctggcgcgttaatagctgatgatggtgtatggcatttcgacgaactcacaaacgaaagaaacgcagagaagttttctaaagttttggatttacatcaaagcggaaatctgttagattatctacagaagaacgcaaaataggggcttcggcccctttgaggatcatattatgaatggtaagcgggttattgtcgttggtgaatcaaagcataacgaaaaaggcgatcatctgatcattaacaacgatcggggtggatggtacggggcgacacaaataaaaagcggttatgcaacgctggttgaaaaagatgcggttagattggcaactgctaacgatcctgggtattatggtactcgcgaagagtttgaaagcgaaaaggatcaagagatcgcagaattgaaaacacaggttcataatgcgcgggtgtacgctgcaatgtgtttcactgtagcggttatgattacgattatatactggatggtgattttataatgacagacgaaattgtaagaaaccgtattcgtgagttaaaaactttccaaagtcgcgatcatgcgatcatggttggtagttacattcactggttcaagaacaacgatctggatctgaatccgtcctatcagcggccctacgtgtggaagcagaaagagcaagatgctttcatgaagactttgattactgggtttccttgcggtatcatcgcgatcgcggttgatagtgaattcaacgaatctcgatgggtagaagtcatcgacggaaaacaacgcttgacaactatcatgaaattctggaacaatgaaattggaataccgatgcctaacggttcccgtttgttttggggtgaaatggaaagacatgaacaacgtgcttttgaaaacatttcattaccagcgcttggactcgatgagtgcaacataaaagatcggttgaatttctttttgaaagtgaactttgcaggggttccacaatcaccggaacatatgcaagcaattttaactatgtatgagaatgcaaaatgaattttacaacagcgccttttgaaactggtaaatggtacttcaaaaaacggcagagtcgtatccatagctatacttgcaagaaagaccatctttactatccgcaagtaatgcaagctatgtgtgacgcagaaggaaacattcacgctgttattgttccttctaataattgtaaactgagcctggttcagcgcaaaattcctaaagaattctatgttctttatgaagagtttacccctactcacctggaagaatcgttatttttcaaacatggtaagcgttacaaggtttctaaccgtgggatcattgattgcctggctgaaatcgatttagggaagtatggtcataacacatcgttacgccgcttcctttcttatggtagcaaccgacaggaacagcagaacgttatctatatcaataaagttgatatgcatggcaacgcgatccacattctgggaaattcatgcaccagtgaagtacaaagttctttccggactaaaattcctggatggatgttgatgtttttggaagaagtaggtgaaaacaaaccagtcgtggcaaaggatccggtcgaaacgatgatccagaatcatgaaacactggaagaaacaacccgtcgtgaactcattcaggatgaagttgtggatcttccaaaggcagaaggaatcatggtaagtcatgaagatttagccctgcttgatgcggttaagtttctcattgaacaaagttctgttgattatggttcccgtgctcgtattcaactgagtgcagaaggttacacgtatggtgtagattctcatgaattcctgatcaagtgggccgaaaaacgccgtagtgagttgatgaaatatagcgatgaactctttaataaaatcaatgagttgaaagcaaccatcgaaaaattaccaaaataatcaaaaagcccttgcattcgtgcaggggctttgttatattacacacatcgaaacgaaacagagaaaggaaaacatcatgaacatgaataaaaacattgccgctgtagttggttgtgaagtttctaacgcagaacgctatgataacggtttctctttctgtgttccgactgaactcgatgcatacaaagccgcttacaaataccgcactatgcataaggtaaacgttacttacgcgcctaacatcgaaatgtggttggttcaggtttacaaagcatgaatttccatgaacgcaaggccgcacgaaccgattattacatgaggttcgtgtatggctggaaattaaggaaatgtgttgcatgtaacggatcggggcggtatgataacaaccgttcccccaaatgcagtagctgtaatgggactggtaaagaattttataaaagtgaggtttctaatgagcgtatcaaatgaactgactaactatttcaatattcgttatacctctggtattgatgactgggctagggatgacgaaatgactattaaccatgcatgtgcagttcatatgaaacgcttgcatgagcaagggaaattgaaagaccttaacctttacggcgacatcggatccggctaccgctattcattctctatcaatgataaagagcgcatgaccgttactctcaccaacttagttattcatgaacctggtaatgtcgttgcctgggggatccagaacgggcgatatactgaaaatcacagcatgaaattagcgctgatgaatcataagttgtttggtggttgcgttcctgatatctttactaacgcacttctgcgtattttgaaatctatgtgaggcatatatgagtgatgaaattgtgtttgatgacgcaacattaaacaagttgcatagtgtagccagcggaacctgtacagccatgcgggagaaatgggcggctgcaatcaccgatgataacaagatcggggttgttgatgaaatgggccgcacgtttacggttacgtataattcgtcttggtctgttgctgacaaccaaacaaaatccaattgcttgatgaaattcatcgacatgatggatccacacatgatcaaaaagctggttgaagagatccgccgcctcaataaatttgaagcggaatcgaaccactggaaagcaaatcatgcttgtgaggttgaacgtgctcgcgtactcaaagagcgccctgatatgcccttagagcgcatcaaagcatatgaccgtatggttgagttggaagaagaaaataaacgcttacgtgcgcgtatggaagttctcatgagcgcggaaatgatgcaaaataacctaaacatgatcagcgctatgttgcattctatccaaagcgatactaaccaaacaagaaaattgttatgtgatcgcttcaacgtacaaggatattattaatgtcatggttcaaacgagagtgtaagcatcaagcaactggctatcgaggtgcagatccttacatattccagaaatatagtcaggtagatgggatcgggcgcatccatttacatttatacgctcgatgtgacaaatgcggaaaagagttttcttatgctatgatgcacctggatcgggcgcttaccgaattgtgtcagtattctacgatgcgttcggaaattcaaagggttatagataataccccaatcaaacgatgatttttgcaaaaaccccttgcctatggtgaggggttttgttatattgcattcatcgaaacaaaacagaggaatcatgaaatgactattaaaacgagaagtgttgaggttcagaatttatatgcagttcgcacaatcctggctgttttgatgggtatctctaccggaaaatcttcttatattgatagtttcatattctctctgtacaacgggaaaactcgttgggatggtgatgttagttggactgaacatttttgcgaccagatgaatgagatcgcaaacgaaatcagaaacgggaaatactggaaaactgggatcttctttactctgattgcagcggaagatgttaagttttgggatgcgataggggttccgatgaaaacatggaaaaatattgaactcgaagcaaaataaatgttgcattaaattctggttgtggtatattacacacatagaaacgaaacagacaaaaaggaaatcatcatgaaacttgttcgcgaatcaatcaaactgggtaacgaatacaacggtaaatggtactttgtcatttacgacgacaacgccgaaaaactggaaaaagttgaagatgcattacgtgctatggaaactggtgcttctgttggtggtgaagtgatgacctgggaaaactactgcgacggttgcccttgctatagtgatggtttcggatctggtttctggattgatattgaagacgttccggcgttcaaagcctcctggaaaatcgctaagaaaatggcataattagcacaaattgctaaaactcgataaccctgatctgttattgtacacacatcgaaacgaaggaggaaatcatggaaatcatctacaaaagccggaactacaaaaaagaagatgttgctgcggtttacatcaagtaccggaacgtgaaatgtgagtatagcgggatctggggttatgaaatcgttgtcgaagaagtcaacgccgacaacaaaaccatttgcagtttcaccactaacactgatagtcctctgttcactactgaacagcttgaaaaagcgtatgatctccggaaccaggcttttaacgcggtacgtataaaatgaacaaattctaaccctatatgaaatggctacgtaatgttagcgcccacttagggcgcgatattaaacccagcgcattatctcgcgaactgtacgaacttgatgcggatccggaagatgctgcaaccgactacgggagatttctatgaacatgtacgaaatgcttaaatcagaaaacagcgaaacccagggcgaaaaagattacaacaaatggaaacgctctgttcaacatatgctgggttcttctgattatgacgaagatctgatgtatgctctttactcggacggctgcaccccagaagatgcagtgtgtgaatactacgcacaaggggacgaagaatgagagatcaaccattcagcaaaaaatatcgtttgtgggctgaacatgttcgaagtttactatctcctttgaatatttcatacaacgaccatcactgtactttctttggatttttctctgacggtatgacgccagaagaagcaataaaattcttcatggaatacaaataactcttgcgctgggtgtaggatgatgttatcttacacccataccgaaacgaaacggggataaaaaatggacatgttgacttttgaacagtacaaagcacagcgcgatcagtaccaaaaatggattgatgagatcggcgcagagttaagagcgtatcctaaaaatgaaatgggtatgactattgaatcgatccgtatgtctccggcatacaaagaaaagaaaaatcttttcaatcgtgtattttcaaatctccgtgccttgaacggcgaatacatcaaggtgtacaaaaaagaactggctgacgaacgcaaacaacggtgggtaaaatgatggaacatgtaatcaaaacagagattgacaaacgcgtatttttggaaaagaataaaacggtaacgctgttgaactactccactgaaaattgttctagtgaattttggcgcgttaacattgatagcaaagggcaacaccaatcaataccgtttgataatgaaagtctcgctcgcgctgtcttccaatcccatgttagattttgagaattatattatgaataacgcacaaactgttctgaaagctcctaccctgttcatctatcaagatggtgatatccgttacgctcgctctaagtggtataactacaatttcaacgttaaaactggtgagttttctcgctggggaacatcgttcgaaactgatcctacctatgccccattccccgaaattctcgatatcgagatcacaactaaatgcaatggccctgctggtaaactttgcggtttctgctacaagtctaataaccctaacggcttcaatatggatcttgatacattcaaatctatcattgataaaatgccctggttaacacaatgcgccctcggtgctgatgcacagggacaaacaaaccctgatatgtttgatatgatggcctatgcgcgttctaaaggcattgtaccaaaccttaccattgctgatgtatcaaaagacgttgcagcgcgtttagcggctgttgctggggctgttgcggtatcagtatacaaacatgctggattcgatgtagcgtttaattcagtggctaatcttgcagaagccggacaacagcaaatcaaccttcatttcatggttagctctaaaacctatgatgacgcgtttaacgtggttgatgctgtaaagaatgatccgcgcttgaagcaagttaacgcgatcgtattcctgggtctgaaacaaaaaggccgtgggaagaactgggacacagttacccgcgaacaatataaaaaacttgttgaatattgcctcgattctggtgtaggatttggtttcgatagctgttcagcccctgcttttgttgaagcgatggaaggacacccaaacttcgaacagtacaagcaatatgccgaagattgcgaagcaactatgtttagctcgtacattaacgagaaaggcgagttcttcccttgttcgtttaccgaacgctgggttgaaggtggttgggaagaaggtttgaatgtcctggaagcgaacgatttcattaaggatatctgggaacatccgaaaaccaaacagttccgtaatgaactgatcggtaataaggatcataacggttgtcgtaactgtccggcttatgcggtatgcggtaaagatatgcgcgtacacaaagcccctgaacctgatgtttacgcggtggaattgaaatgaaaatattatcgtacaacacgcgacataatcgcttagttgctctggtatcggatcgggaagcgtcactccttcagcgtttcccgactgaagaaatggtactccgtgatattgacggatatggaaatgatgatacaatgatcgcatcaagcatcaaagttgaatcggtcgatatgtgtcacgtatcaactttgcttgcataccgtcattatgttgaagatggttcacaacacattttcgactttatcgctaaactgacatctagacttgatgaagaggaatactatgatttattcggataaacctactcttcgtcctgttcctgtaacagttggtattgtgaaaccgcgaacgttggatagtttgatcgacaagtacagtatgatgccaatcaacgcgcaatccgcgcaactggcactatcggaaagagacgctatttgctgcgagtgtgacattaaaggttttcatacagaagaagatcttgtaatgatggattacctatggcacattcgtaatgaagttgttacttatatactggcgtcggaacgagcaggacgcgctgtagcagatgcgcatagagaatcacagaactacattcgcgggttatcagcagtagaacgggaggcgttatatgcaagaaataatcgatgaacttatgtatgtgtacaaagagcgatgcaaaaatggacgcatcaccgaaccaaaggcaaaagcgattattgaaaattattgtgcaaaagtacaagcacaagacgctagttcaaaacttctgaacagtctgatgatccttaaacttttgattgcatccggtgatgatatgccgtatgatgtagatagtgcagaagcattccagaaaagttatcgttcatggggagtgatttactcccgctcactgggttcttatgattcggttatgtggaacctgatgcaccttgataaactgatctgggaagtgctgaaagaagagggtatatcatgacatttactcataccggaatggttgaaacgataacagcaggtaagaagcgtgttcccctgatgaaatcggggaaatactggaagagtgaaaactataaatttgatcataatggtaactcatttggttctttttatgctaaactacacctgaaaaccattaaaccgatttaaaggaaactctatgttaactaatgaacttagtggggctattcgtaccattgaagggatccttcatgatttgcgtatgggtaacgaaatttgtgtaagcgacattgaagcaaatctggttgaatggcgcggcgctctgtatggggcaacacaaggaaaagatccgttgtttacggaatatgatatgtatacagtaaccattgacaataaaacttatcgttttcagtggcctgatgatgcatacgatcatatcaaaacattttacagtactggaggtgctctttttgctaccagtattggtgttaacgaattgccttttcatcctgatggattgagaccttccgatcatttaggatgtacaactgtgttactgggtatgtgcggtaactattctgatcccgtgtactggattgaagccagtaaaaccaacttaaaaagagtttaacatgaaatatattattgctttggtgttagtcgttattgtcgttttagcacaatccggatgcaccgatgagaaagaagccgaacgtattctgactgctaacgggtttagcgatatcacgtacacaggccacgcctggttcgcatgtgatgagaaagacacctacgcaacagggttcgttgctaaaagccctacaggggtgaaaattgaaggtgctgtgtgctctggactatttttcaaaaatagcacaattcgcttcaaataagtgttgacgtagatacggggttatgagactatagccctgtcgaaacgaaacacactttaggagagaaaaatggacatcatgaacgaaatcttagctcacatcgaagccaacaaagaagcaatgaaagctaaagaaggttgggttgttgttgacgattgcttcaatactaatatctggactccggttttcatcgatgagaacggtaacgaagcccacgggttctatgatgctgcaatcttcgatactgccgaagaagcatgtgatttctgggcctacgttagcggtgatgctccatttacaaaatacggtgtgtgccgttgctgtgaactctaattaactagccccgaaaggggcttttttgtaggtaaaattatgattacgaaagcacaaaggatcattaatcatttagaaacagggttcccgtaccagggagatttaacccgcgatattattgatatcctttctgaacacgacggcatgaaggccgaaatcgaagaactgttacatcctgatgctaacgtgtttgcttcattgatgagcgatgtagtgaacattgacgccgatgaacttggatgcattgaaacaacaaatgatggtgataaaaccatactgaaacaggcttgtgaacggatagacaaccttcacgatcgtttgttcactctaacttttccgtcaaaaaacgataaaccttgttgacatccagaaaataaaccagtagtctgtagttacaccaattgagaggaatatattatgaaaagtgcttttgaaaaacgtgctgttaagaaagatgttaaaccaggcgcgatcatgtatgaagtattttgtgtgaatggcgaaaaggcggaaatgggtagcaagatgattgttactggcttcccgtatatgcatcgcggtatcgggctgtttgctaaatgcatcaccctgtacaaagactgggactgtcacacagagttctctcttgaagaccgtagtatgaatgggcgcaacggatataacttccatgctttcttcctgaccaaagaggatgcacaggcttacattgatgaagtcaatgaagaccgtcttcctcctgatatgaaagagcgaaaagaagaacagatgaaacgtaaacgtgaatttgaagaatgcttcggtgatctttacgattattaattatcgaacctcttaaaccataaataccctgtgtacccaaacagggtatttttacaagaggtgatttatgtttaaattcagtcaaaaaagccttaacaaccttaaaggtgttaaacctcaactggtgaaagttgtagaacgcgctctgcaactgtctcctgttgattttggtgtacgtgaaggtctgcgtactgtagaacaacagcgcgagaacgtccgtaagggtgtatctcaaacaatgaactcaaaacacatcacgggtgatgctgtggatctgtatcctagcgtgttgcctcaaggctggcaaacaaaccctaaagtgtggttgcctgtcctgaatgctgttaaacaagcaggtgatgaactgggtgttaaactgcgttttggtatcaactggaaaaatgatccgaaccttccgatcgaaacaaaattcattgatgccccgcatgtggaattagcgtaacaaaggggctttggccccttaaaggtaaaacatgaatagtgaattttatgtaaagacaattgaagaatgtcgtaagatgcatcttatgcgagagttggaagaaccaacgcataattacggccctaacgattttatggtatttgaaaccaggttggatctgggtagacgaacacaaaagactaaaggcgcgtttgattttatgaaacgttccgatagttcccttaacatttacgtagcgcatacgttaaatgcagcacaagaagccaaacggctacacggtgctaccggatgtgatgtattgaccagtaaaggggcaattcttaatcatttccgtggacgtcgaatagagcaccaggcaataaaccttatttttgatgagtgtgatcttacgcgcaatgaacgcatggacattgtgtataatacactcatgcattgtgtacaaaagaaacatccattagcatatattcacgtaatttctctgggtatgtaatgaaaagtcatggctattcatcaagaaccatacatgaagagattcaagggatcgaatctcttctgaattttgtagatgttgatacatctacaggtaaagtgtattggaaagttcagcgcggccctatgtctcctggaagtgaagccggaagcaaaaacgagtattcccaaattcattttaaaggttctatgtatttgcgacaccgaatagtgttttacgttgagaatggttatcttcctcctatcgtagatcatgtatatggtgttgagaatggagatacagcaagaaatttacagaaagcgacgaaccagcaaaatgcgatgaaaaagaaatgtaactcaaacagtagtacagggttgaaaaggtgtttcttatcataaagccaatgggaagtacaaagcgcagataaacatagatggaaaaagaaaatttttggggtactataacactccagaagaagcaaaatccgtttataaccggaaagcaaaagaggttttcggtgcattttttaacgaaaccacataaggttaatgtatgtcaaaatacgtattagacaccaatgttttgattagtaacccctattcaatctattcattcactcaacctggtacagaaatcattattacctctgctactatgggtgaattagatcacctgaaaacgaaagaacgaacagcgcacgaagcacgattggcgatccggcttctgtcaaaagttattttcggtcagtcatatgatgcgattacgaaatcaggtattcctttaaacctgacaaacccagcactgtctgacagtatcacccttaaagtggttgattatgtcggaaacaaaacgtttgctcttgacaagcaagacgaaagaatcattgaaacttgtatgcaacaggatgcaaccttagttactcgcgatattatgatgttgctgatcgcaatgtcccgtgggtgtaaggtagaacagtatactggcgacgatacgttaaaagatagcgatgtattgtattccggttacgtagagatccctgatttctgggataccgtggaagtgttgggatatacggataatgtagcccaaatcacttacagttcgcttcctgacgaagatttttatcctaaccagtacattacctcaaatggtgagttagtcgggcgtgtggtgactgctgatgagatttgcttgaatgtcttacctgttaagcacgaacaggctatgaaacgcaaactcatgaaagctattcagccccgtgattctctgcaagcggctttcgttgaatccattatgagcaatgaaatcgatgttgctaccattatgggcggcgctggttctggtaaaacaatgcttgctgtttccggtgctatgcacctggttaatagtggacattacgctaacttgatgtatgtgaagtcagatagcccgttatcaagtgaaatcggcttccttcctggtacattgggcgaaaaactccggccttctatcgaaccttgtattactagcctgaacattctgtttaaggataatccggaatctgaaaaatacattgaaggtttgattgaaaaaggggtggtgcaattccctagcctgtattacttccgtggtcgcagtatcggacatccggatccgggcaaaggttctgtgctgattgttgatgaatgtcaaaaccttagcaaccacgaaattaaatctatcatttctcgttgcggagagaacacacttctgatactatgcgggaacattaagcagatcgacaaccctcgaaacactgccgttaacaacgggtttgtatgggctgttgaaaagctgaaagaatacgaacactcaagccatatcattcttgatacagtgtatcgttcccgtctcgcggcgtttgtcgaagacaatttctaatgatgggggcgaaagcccccttttttgtgaggtgtatatgattactgtcatctatagcccaaaactaattactgtttgcagttgctgtaaaagtgggttagaatatgaactatctgatatacagcaaaagagagaagcgatttacaatggatttttctctgctgctgattatgtcgtgaaaaaatttatcacatgtcccaaatgtggtaactctgtgaaattatttttgaattgaggtttccataaatgaaactagaaaaacgttattatgtagcaaaattgagcgatcttaaagaactgacgccagaagatttgaaaacgttcaacgaaatttgcacgaaaatcgaaatcgggcgcgggatcaatggtaagaaaccatttgatgcgatcgtgatcgagaatgattggcccgaatacgataaagtgttggaaatgctgacttctcgtattgttcgcgaagaaaccgatcgcaagtttgaaaagatgctggacaacaaagaacgcctcggatactttttcgttgttgaaactcaccaggggacttttctgatcaccagtgatgcgcacagcacgaatcggctgacgaaatacagtgggtacaaataccgcgcattgttcagccctgattgtggatttgacaacagtgagatccttactactagctggagcgtctactttaaacatgccgttatggtatcgttagatgaaatcattgcactatacgatcctaacgaggctatttcaaattataacattgctgagtttatcaacgataaactacgtgacgcgaaaactatctaaaatagttgcataaatataaagtggggtgtattattgccactctttttgcaacataggtattaaaatgaagaaaattattattgctgccagcattttcttgtgctctttttctggcaacgctgcgacggatccgctaggggatttcattgcggatttgcctactcatcaattgcctttacaaaaggctactgtgaagcctccggcaaacaaaaattctccatcctacatcaaggatttggataatatcacaccgaagcagaaagaggttttggagtatgcttatcgagttggacacaactatgatttgaagactgcaaaacctgtagaaaaagataaggctaaacgtttaggctatcatttagcggctattgtctggatcgagtctcgcgcatgtgagaatgtcggtaaaggtaaaaaaggccatcacgcttatggatgctggcaagttaccgcaaggagcgccagcgcacgaatggataagtcatatcctaaacgcgtagtaatcaaaaagctcgaaactcttcaaggtggatcgaagtatgcgatctatgaactggagtactggcttgattaccacaaaggcgacttgaaaaaggcgctggcgagctataacgctggtttcaagtatacaaagaaagaagcccgtgattatgctcgtatggttaatacaaccgcgaagctgttagaagaaaaacaaatcatttgacaaaaagcccttgacttcggtcgggggcttttttattatgagtgcatctaattgagaggaatacattatgagcgtttcacatcaagtcattgtttcacaaaaatatgattaccctaacctgttgcgttgtgtgcaagcaatccgcgatcattttagcaaacaagacaacatcgttatcaaagagattactttgagtaaatctctcgattgttttaacatttatttcacatatgataacgaacagcgccgcctgttcatttgtgaactcatggatatgtattatgatatggaatacaatcctattcctaaaaatgggatttattttagtatcaatgtctggggagaatcacagaaaatcatggatcttgtgaaagaaaccgtgtacactgtcattacaagttcggatactgtgtatgagcgcccgaacgatgcttatgaatcacgattcactttggttaaatgaggaatacattatgagcgacctgatcctgaacgaaactaaacgcgtactgtttaaagctggttcctacatcgtagctactccgaaaggcaatacttcccattgggcggttgctgattggatcatgtacattgataaaaacggggaatgggtacaatgagaaacttagcgttcgaagtgaccgtaattgatcaacggataaaagaacttcatgcacagatagccccactgcaagaagaaatttccacgttgattaaagagaaaagagacctgattgaactcatcgatcaggatatcattaacaacgtcaaggacggggaaaagatccccgtgatgttggaatatcgttcttccagtgtgtcttatcacgcggcaacaaaatttttcgaatctatcggtctgggtatcgatggtatggatccggacattaaccaatactgtttgcggatcgcgatggatgaagacggttcaaaccttaatcgagttttaaccgctttagaaatggttgaaccttttgtcaggccgcaagcaaatgggcgtaagcgtttcgatctgttcgaacatactctgtctgaatgggattgttactggctgacatacaatccagctaacaaacgttgggctgttgaaactggtagtgggatgagacgaaaccaggatccgacattctcggatatgtctctgaaaaaagttcttgcgtatatctgtaatgcgcattattatactcctatcgaagaggatgaataaggaatcatcatgaaaaagttagcactgcttttaactctggttgctggatttgctcacgcgggtgatgctcgcctggatgagttatgcaacaatcgtgatatcaaagatgtcgcagtatgtaagcaagtgatcgcagaacagttagatgttgcttatatgtggggagaggaaaatgctcacctgtataaacgcggtaagttgctgaaacaaaaagagtttttgcagtctgaaccaatgatgaatctatgcaaacaagcgccaaataaggaacggtgcgaaaagttccgtacttatttggttgacgaattcaatgctggcataggactttactaatggctatctggatttttattattatggcggcggttgtggtgttcttggcgtacaatgctggtaagcatgagagcactgggccttgttactattgcggggatgatgactatgtttagtgctggatactttataggcgttgttatcggttttataatttttggtggtgttttatatatgtgtcatcaagaagatcgccgccgtgaacggaaagcgagaaaatgagcgtaggggttcaattcactgtattgtggatccttgtgattttgatgggccttgttgtggccctactatatcggaaaaataaaaatgatcattaaagaagtgaaaggtaatgctgtcaatatgtatctgaacggtgaaggccatttgatccacggatgcaactgctattgcaatatgggcgctggtattgctcgcgagatccgcgatcgtattcctggtgcatttcaagttgatgtcaatacgttaaaaggttcccgtgataagctcggaacttgttctgtttacattggcgaaaaaggcaacattgttttcaatgcatatactcaatatgatttctggacacctgggccgcgtgtcgattatgacgcaatcggcaatgcttttaaacaggctgtagggcttgctgacgccgttaagactggaaagcctatcatcacacctttaatcggtgctggcctcgctgggggcgactgggaactcattaagcgcattattaatgaggtgactggtgattacccgatcattgtcgttcatttcgatcctcgtaaggcgaattaatcatgatggatcctatcaaagcaggtcgggagattaagaaagcgaacaaacggatcgccgtaatcaaaggacaacgcgccgcactggttaaaacctgtaatgcattggcgcaagcgatgaaagcgaataacatcaacattatgcagcgtaaagaaactgttaatgttctatgtatcgttgacaattgtctgagtaaggaaatggacgaactgaaaagtaaaatcaatatgtggtatcttgatatacatcaagcacaagataacgaaatgagtggttataatcatgactgacaaaatcaaagctaaagcaatgaaggtgattgcgacatatggaacactccgttggtgtaacgcgcaggtgtgcgggtgtatgggttgcgcaaatcataccatgacgaaagaagagtatgacactgcgatccggatgccagaaatcaaagagtatcttgcgcgacataatgaaaaactcatgggtaaaggatggttttcaattggctaacgcacacattatagaaaaagttcgttgtcgggattgtcatttccctttaatttgcgtaatgaacattaccaaacccccttatgatgagtgggattggtggatctactgttcaaacaaaacatgcaaaaaccatgaaggggaaggaaaattccagaataccccagattttgttgagaggataaatggctaaactgtattttcattatgcatcaatgaatgctggcaagagtgctcgtttactcactgatgcatacaactaccaggaacgcggtatgaggatcctgatgtacaaaccagcaattgatacgcgagaaggtaaacagagtatctcttcgcgcattgggttggaagcaacatgtaccatgatcacgcctgatatggacttgtattatgatgttcacaacaatcatttttatagcgacagcccgaatctggtttcttgcgtgtttgtggatgaagcgcaattcctttccaggaaaaacgtcatggatctgtgtcgggtagttgacgaattagatatacccgtaatgacatatggactaagaaccgattttcagttgaacttgtttgaaggttcttatatgttgctggcgcttgctgatgagatcagggagttgcggggggtttgtcattgtggaaagaaagcaactaccgttgcccgtattgatgcaaatggcaaatttgttgctaacggcgaccagattgagatcggggccgaagacaaatatgtttcactttgtcgaaaacactacttgcaactaaagaacaaccctgatacagtggaagcataaacaaaaggagatcattatgagtcgcacttaccgtaagaaatacaatcctcttcgtgaccgttcatctaacgaaaagatcgaagaagtaaaagagtattctcgttattatgctcaacatggtattgatccggatgggttacgttggtactcaaccaactggaaacacaaatcaggatgtgcatacattcgatttgataataatttgtgtcgcgacggtaacaaagctcatggcgatctgaacgcaatgctttctattgcagtaaagaaaattgattcaaaagtacgtacccgtttacgtcaggaactgaaacgtatgaaagctggtgtgatcggttgggatgaaaacgtagaaaacgtgaacaaaatacgcgctttcgaaagaagtttgtgttggtatgacattacttgattgactttacaacaaaaatattataacgaggcttcggcctcgtttttgctataaatatatacaggagtagacctatagtgggtctatgagtaaaagagtaattgttatgaacattaaacgcatatcaatggctgtgttgtttggattgttgatgatgacacccacaacacacgccgccgaccgtccggttcagaaagaatttgacgattatatcaatgcggcccttcaagtatacatcacaacgatccctcccagcgtaaatacaagcgaactattctacaactacatggaacgaaaatggcgccaaaaacaatgccgatctgaatccgaatgtgcaaagctagggattagggtcgcgtatgagtttgcaagtatccatcgttcataaagggatcatcatgcaatcatttaaacaaattacagaatctgagaactcaagcaagatagatgcctttattggcatgtgccttatgtccgttacctatatgcatagcgcacattttgcaacaggttcatactcacaacataaagcatatgagggtttttacgaagatatgcaggatttggttgataaattcaccgaaatccacataggaatcacgggaagatacaaacctgtgctaaaaaccgaaaatgtgcttgacacggtggcgtatctccgtaaaatagccaacgaagcaaacgagatctacgaatcagtagatagttctttgaagaacatcctggacgagattaagggcttgtgctatcaaacaatctacaagctgacaaaactttcttaaaaatagtttgacagcgtgaaatgtgatgatagaataactatcgaattgaacaacaacttatggaaattatgatgaacttaaacactatcgtgaacaacccgaagaaaacctctctgatcgctctgggcgtagtcgcagcactgtggttagtgcctaacatgtataccattgtgcaagacggtacggttaaaactgaaaccttcatgggtaaagtatcaccaaaacccgtactgcctggtttccacattgtaaacccgctggcaacgtttgatacgttcagcaccaaagacatcgcgatgaagttcgacaaattacaggttccgtcccaggataaatttaaatccactgtggatatgaccgtaatgctgcaattcgacggtagcaaagcaccgatcaaccgtatcaacgcgggtaatcaggatcaggcactggataagtatgtaactgaaaaactgctttccactgttcgcgaatttggtaaatccgtaccaaaagcgcaagacctgtttgatgcgaagatccaaaaccaactgcaaaccgcaattcagcaggaagtagaagattatgcacggccttacggttacactgtgaaacaggtattcttgcaggatatcaccctgccggaagttatcatggaacaggtaactaacacgaagatccgcgaagaacaggttaacgctgctaaagctgaactgcaaaaagtagaacagacttcattacaagcagtaaaacaagcggaagccgatcgccaggcgcgtgaaaacgctgcaatcgctaacgaacgtgatgctgatgcccgtctgtatgcagcgaagaaagaagcagaagccaacgccgccctgcaacgcaccattacaccggaaatgatccgctggaaagaactggatgtacagatgaactactctacccgctataaaggtggcgtacctcaaactgtaatgggttcggattatgctggtaaagtgattttcgattctcgtaaataatgttttaaagccccctctttgggggcttgacatctaaaacgagaatactataatgaacataaaacagatcgtattgacaatactcatttcactattctttggttttattggtggattgtttggtgttttaataattgcgtctgttttatgattaacctttaaacgtggagcacgttatgaaacacaaatatgataaagctgtagtaattggacgttttcaaccttttcactatggtcatgagaaaatggtaagggaagcccttgctgttgctgatacggtttacattctgatcggttctgcttatgcatatccgaacacattaaacccattgaccgctaaacagcgtcaagcaatgatcactcgctggtctatctgcaaacttgatgttgaagatgcagccagaatcaaattcgcgcacattccggattacctatataacgaggaaaaatggaaatcccgtgttcgtatggcaatcgatgaaactcgaaatgatcgaattgcgatcgttgggtacgaaaaagacaaagattcttactggcttaaagcattcggatggaatcatattccggttgaacctgtgaaggttggagaccaggatctatcctcgaccaatttacgcaaaattatctgggaacaccatgaaggctgggacgaagatttgttaaaatatgcgcctagcactacggtttcctttatcgatgaatggacacaaacaaaagaattccagcgtttgtcccatgaagatgcgcactggcaacgagagattgacaagttcaaaaaatatccgtatccggattctctgaactgttgcacggctgattcagtggtcgtatgtaataacaacgtgttagtaattcgtcgtaagtttgcgcctggtaaagatgcgttggcgcttccgggtggacacaaaaacggtaatgaaacgttccttgattgcgcgatccgtgaattgctggaagaagtacgaattaaagtacctgaaaaggttattcgtggttctatccgtaattcgatgctgttcgatcatccgaaacgttcggtgtacttctcaaaaccgactgtagcacagtatatcaagctcgaacctaataacgatggttcattgcctcgtatcatgggcggtgctgatgatgcagcagacgcgttctggctacctatgcatgaggtcgtgcaacgacaaggggaattcttcgatgatcatttccagatagtaaacgcctttacgggggttgcttgaaagcacattcatctaagcaaaccttagaacaataaccgcacatatagatgatcttttatgtgcggttattgtgaatccagatttatacgaaatttaataaaaaagcccttgcgttctcgtgagggcttttgtattatacacacataccaagtgattaatgaaaaggaagaaaaatgaatacaatcaacgtttctaaagctgatgttatgaaagcaacgattattgctaccgaagccctttcattcatggctaagaaagcaggagttgatagtgctgttatcctgatggagattacaaacaacccagaaggcaacaccgcaaggtatttcaaagatcttacttcctatgcaatggaagaatttaaatgattaaacatccctattgtcttgttacccgcccggttagtccgggtggtttgcctgttacctgttggcagttgattgaaaagggtgatgcgtttttaaacaaacgtggtgagaatgttttcgtttacggtgttaactcgatcgagaatgaaactatggttatcactgacgaaaaaacaaatgaaaaatacacgttgacatccgaacacgattgtcgtaattttaacgtatattggaaatctgatgaagaatttgaaactgtgaggaaatgattatgatccctgttattagtgctcgtgaacaagtagcaaaaccccgtgctgttaaagttggtgattttctggacgtgagttttacctgtggagaaactcagaagcaacacaaagaatctttcagcgtgatccttgtatctaaagattctgatggttcaatggtttacattctgcataaagtaggaaccgtccgtgttcagggtcatgtaatgattatctcagtatatcctggcggagataaagtatcttctcagtgtttagataaagtgactgctcgatatctgagagatagtgttttcatggcggagattagcaaaatttatgttaattctcgttctgctgttgatggtattgttacccatgtaggtgatggattagtgttcaccgaaaaatctcatgaatcggttagacgtgctgttaaagttggtgacagactcggaagccctcgccgtgattatgtggttgaatacatcacctcttctggtgacatcatcgtgaaagctgacaaaggttctaccgttgtcatttcccgacgcgataaaaagctgattgaatcactcaatcaggatctggaatggatcgatgaatcagaggtgtacgctgcatgaaacctcgcttgattatgtcggatatagtgattgtcaacaacgaagaatactatgttgcagacatgaacacgaagggaacccgcgagattttggatctggagtgtgttaagggtggcgaaaatcgattcattgtgataacatacaacagaagcagtaaagaaacattgggagtgtctgttcccgttcattactgcgaaaaaactaattgctggagacgtaaatgattgatttaagtgatgtgaaagttggcgatacgttgtatgatgctgggatccgtagtgatcatcgacaaaatcgcaaccccaaaaccctttatgtacaaaaagttgcgcgtcagtacctgtatgcatcttttcgaccggaagatgggcctgattgctgttccaatattaaaatcaagcgcaataacgggtgggctgatggttggatgggttatcaactatatcgcagcgaagaagaatataaagaaatggtgtaccgccgcgatttgtgtgataagattaaaaaagtatttgggaacagctacggaacaaacatccctgatattactaccgctgaattgcgcgggatcgcaaaaacattaaaggttgaattctgatgaaaatgattatggaaaccgtatttggttctcacctgtacggactggaaacaccaacaagcgataaagactacaaagggatctatctccctcatcctcgcgaaatcctgttaggcactgcgaagaagtctatcgatacatcaactggtgataaaaactcaaagaacgatgttaatgacgtagatcgtcagatttacagtctgcaaaagtttattagcctcgcatgtgatggtgacaccgtggcgattgatatgcttcatgcagatgatagcaaactgatcgctaactctgatatctggcaatatctccgcgctaaccgttcacgcttctacactacggaactaactggcctgtttggttatgttcgtaagcaagcggcgaagtatggcgttaaaggttctcgcctggcggcactgcgtgaagttgttgatgtgttacaaatgattcccgattactggtatggtacatcattgctgggtaacgtggatgaatctaattacggcaagcgcatcaaagttggtgagatttctaaccgattcccgaccaacgagttttgtcgattcgttacagacaaaacactgaaatcgggttgtcaggaattttatgaagttctggggcgtaaattccagtctacgatcaccgtagcggaaatgaaaaaatccgtgtataaactctgggatgaatacggggaacgagcacggcaagcagaagccaacaacgggatcgactggaaagctctttctcatgcgttgcgcggtggtatgcaattgatccagattttcaaagaaggtgatattgtatatcctcttccggatagtgcatttttgaaaatggttaaagctggcggtgttcctttcgcaaccgtacaagaggcgctagaatcaacgatgtgtgaagttgaaaagctggcggctgtatctggttatccgaaagaagttgatcgcgatttctggaatgatttcattgaacgtgtgtattctgaacatgttgtgaggtactataaatgacatatccgaaattatctggcgctgaaattgatgttctgtgtaaactttacggatactcgtcaaaaatgttggatttagatttcaacgatgttcccagtaaatcagggcgtgattccctgattcaaaaaggttacgcatcaatggcgtttagttcaccaacgaaaaatactgatatgtgtttagtgatcacccctctgggcgttgacgcatacaaacacggaattgaaacggagtggcgataatgggtgatgttattttgaacgttaaagatgtagtattgggtgatactaaaaccctggattcggcaatggaaaaggctgttgttaaaattatgcgcaatagcctccgcctggaagttaacgagattacagaaacttgttatacaggtgggctttgtggtcaatctctttatcgtgatgcaaaaagtgtgaatattcagctatgggctgatattggcgaagaatcatacaaaatcgatgaggttgatttcgacgtatgaaaataattgacctttgcgctggtgttggtggcgtgaggctcggtttcgataaggcattcggcggggtcgaatgccttttaacgtctgaaatcgataaacatgcacaacaaacatatgctgataactggggtgatgaaaatattcagggtgatatattcgccattgatgaaaacgacgtacctgatcacgatatcctgttggcggggtttccttgtcaggcgttcagtaaagcagggttaaaacagggcatgttagatcctcgcggtactatcatctttgaaatactccgcattatacgggctaaaaagccctctgtgctgttctttgagaatgttccccagctattaacccatgacaagggcaacacgtttaaaaccatctacaggctgttacaggacgaaggatacgatatccattatcaggtaatgaatacaaaagactttggattgcctcaacgaagagagcgtgtgtttattgtctgctttcgcgatccggtattctttagttttcctgttcctccacgtaccccaacaagggtcggtgacattctcgaaccggataatgatcaatacaccatatcagatcgtgcctggaagggctttagagagcgtaaagaacgaaacaaggcaaacggtaaggggtttggctatcaggccgttacagttgattctgtgtgtactgggacgataacagcccaatactataaggatggtgttcaatgtctggtattgcaggaaggtaagaaccctagaagattaagcccgcgagaatgttttaggttacaaggatttccggattcgtttatcatccctgaaagcaaaatacaggcttacaaacaggctgggaattcagtttccatcccagtgattgaagccatagcaaaacaaatcaaaaaagcgcttgcacaggctaaagaagaatagtatagtgtccttgttgaaacgaaactgacaaaaggaacataccatgacttttaatgacctgtttaacggatgtactggggctggtgcgaaattcaatcttctgaaagattatccgctgggttctaatcctggttatgtgatggttgaagttcgcaacggtgaatactataacgtgttcatgtgggatcgttctttctcttactgctggttcggtgcgaaatataaaccagattacattctggagcaaatcgaaacagtgaaagctaaaaatcctgaactgtatgcattcgcagagtctattcgtggtgtgttcgggcattaattaaacaagccccgaaaggggctttttcgtgaggtttatatgattaccgaagttattgaaatggttttatacgcgttaacttttgtcctcttgtttcttagtgcggagtggactagtcgcggaaatgtagtaatggcccgtatttgtgcggttgctgtgttctggatcctgggtttactgctggttagcatcgttagggggtggtgatgatttacgtagcttattatagtgctgattatgaattcactgaaattgttcatgtttctgaatcattgcaaaactgtgttgatgcgctgaacaaagttcctaatttcccttatcttggtgatcatgttactattgatgtatgggaaaatgaaaaaatcattgcaaaaagttcaacattcgggcatcgtgatgtatgggatgaagaatcgcaacagtacaacgagatccctgtaacttttgaagaagttatgaaaaacatgaaggaagtgaaagatgaaggttaaaaatgctgaacgttgggagaaattataatgaaaatccgatctggttttgtgagcaatagttcatcaagtagtttcatcgtccggttcccgaaggatccgactgatatcaacaatctccgcgaaatgatgggtgattgtgttcctaactgtggttatagctggatgacttgcccgacagcggaagaagttgtacagcaagtacaccgcgacctgggcggtcatatggggaatggctttgaatcatattatgatgataagcgttatgaatgggaaaccgaagatagcgccgaaactcgatatcggtctaatcctcaaattgcgcttgcttatgatgggcgtgactggtatgatctggaaacagaagagaaagacgctctgatcaagatgtggttgtatgaagagtacaacgctaaatttggcaatcagaacggtgtattcatttatgaatttacttactctgatgaatgcggagaattccaatcacagcttgaacacgggcaaattttccgtaatctggaacacactatgaagagtcatcactgatggaatacgaaatctgtgtaaaaatgcccccctatcaactgggggaagaaataacgtttagtcaaactctaccagtaccgattgatttattttctttgcgaaaatatcttgaacggttcgatctgaatgagtatactattcaaatcgtaaggattaaaaatcctgttgcctacgctctgtcttttgacgttggcgagtctcaaacaacaacgatggatgattttgtttcattgttgagtagtaagtttggatgcgatgatgcattagatactattagcaaaaaagtaaacgaaattttaataaaatttacctataaatgagaaaattatgatcactaacattgaattcaaaaacgccgtagccaaaccaaccccgactaaccacgtttttgtttgtgacgtatccggatcgatgtataacgaactccctcgcattcgtcagcacctgaaaaacaacctggcaacgctggttaagcaggatgataccgtatctattctgtatttctccagccgtggtcagttcggttctgtattcgtgggcgaaaaggttagctctgtatccgacctgagcaaaatcaatgatgctatcgatcgttatctgcgtccgaccggatgtactggcttcgttgaacctctgcaactggcggttgaagtcgctaccgatctgcaagcggataatggcaatctgaacagtctgatcttcctgactgatggttatgataactgctggcgtactgatgacatcctgaaagcgtgttctactctgccgttgacgtttaacaacattgctttcctggaatatggttattatgtaaaccgtcctctgctggaaaaaatggcggaagcaaccaacgcattacacaaattcgttgaagggtttgatgcgtatgtacctgcatttgatgaaatcattaccgcgcaaacctccgcacgtgttgaagtcaaagttggcgatgcaacccatgcgatctacctggatgaaggccgtgtgtatgtcctgaatgctgcaaatggtgttgttctggttccggaacatatcaagaacatttgggcgctgggtgaaaacgcgatcaatgacgttgacggcttcgatccggcaacagcagaaggtgaacaggttctgtatgtggttctgtatcatgcgcttcataccatgaatccagatctggcatggaaagttctgaaaaagctgggtgatgtgcgtctgattaaagcatacgataactgctttaccaaacaggattattccaacgctaaagatatgatctccgaagcggttgttgatccggctaaacgtttgatggatggtgttgattacaacatggttcctgatgaaaacgcgtttactctggttgatgctctcgaactgctggcagaaaccgacacagtgatcgacctgtcttctgaacactgggcgtacaatcgtacaggccgtcagactgtccagaaagatgatgatacactggataaactgtcagaacagattgcaaacgcttctactccggaagaacgtaaagcactggcggcgcaactggtagcgcatgaagtatggaaaccggaatttacccaaaccacaacgaaagttgcagtgaaacacctggtgggtaacagttcccgtccgaacatttctatcaatacggatctacaaggttacgtaaccattccggaaagcaaacaaaaagagtttggattgccggaaaaagtagaaaccaaacaagtgcgtaactttaccattgttaaagatggtatcgttaacgttaaggtacttccgctggaaaccgatatcccgactctgaaaaacttacgtgcttctggtctgactatcaaaccgctggctaaaattggtgaagaccgtatgtctgtactggttgactttacctctctgcctctggttaaccgttcgatgactcgcggtatttctggtaaggaatttgttgctgataacgtccgtctggaaatcctgaaaggccgtcagaaggtaatgaagttcttccgtgataacgcgattggtttacgcaacgcagaagggcttaaacagcgctttggtgaggcggctggtgaatggttgtctgagcaagggatccgtgattacggcttttctccgaaggttgagcgcacagaatcgactgatgtttacatgtcgaaagaactgaacgtgaaaatcaaaggcgtttcatcacttccggctgttgctgctaccgttgcaaaacgcgccgaaggtaagaagaaactcaacaatggcgacctgatcattctgtgggcttatgatactgtatctaaagagatcgaagcgcttgacaagaatgacctgatcgagtatcttgataagcagacaaaggaaactattaaagaggttcgcgcccttaataatcgcctgagtcgtgtaatgtacggtattgtcgtcggacacgcatggtttgcggatctggattttgaagaaaccagcgtaagcgttaccgcaacagatatcgttgcagcggaattctggaaagatgtgaaatttgattgcacaatcgttctggaagaaaaagaagttaaactctaatgagatctcgcccccgaaagggggctttgaggtgacttgtggaattacttgaattggactttaaaaatcttatgaatatatgcgaactgaatcaaggtgacatcctttatttctccaatcgtgatgggtttcgtaattcccgtcctgaaaacatcggctttcattcacagctacctgatttcatcgtcgttgatgatgtccggttaacagataacggctggcaggttgatgtagtcggattcaaaaataacaacggtgctatcgtatggcgtcctggttctattgatgaataggtgtattttaacaacattcgtgtaaacatcgatgaaatcggaaccgatttgagcgaagtgcgggaatctccgtatgtgttcagcaactggtttaaagttggtggcgcgtatcgttctgataacacaaccgttgtgtatgttgatagtttgatgtctggtatggttaacttcaacccgtcattacctggcaacaacggcacgatgatggacattttcagagattataatcgttctgggacaatgttaccttccgaaaaagcatatgttatcaatcgttgcttgaaagggctgtaccaggatatgcttacctataatgaaggtaacgtaaaagatgcgcttcacgatctgaataagatcctgaaagaagtttctatgagaatggatacccgcaaatgatttctttattcgcgttcgtttcagttgttgtattgattttcgctggaggtgttatctatcatgggtgtgaccgtcgtgaagataaggtcattctatggggtatcgtctttgcgctaatccctctattcatgattggtaatatggtgatgcgatgaaaattcgttctgggtttgtgagcaatagctcaagcagtagctttattatcgggatcggacttgttcgccctggtaaagaaaaggaagttgctgatatctacggtgagaataatattgagtcattaatagatatgatcaccgatgatactcgttcgaagtggggtattcctcaagtcgatagcaacggtacgatctcactggaagcgttcggttcccatagcgttgagatttcgtatatctgggataagttgaaagaactggggatggacgatatcaaaattgttcacttcaatgaacgcggcgatgaaccagaatatgatgatgaatgcggaagatacaattatagctggtatgaagacgccgacgcgttcgggcctgaactcgaaagaaagtataatttattacgtgataaccgcgaactgttcattgaaggcgatgtgaattgtggcggggattacgacggttaaccactggggtaatgcatgataacgatagtatactgggaagaagtcgaaagcgaaatgatcgatggggaactggcggaggttgacggggaatccgaaatgcttactgctactgaaacaatcgaaaacgctttcgatcgaatcaaagcgcatcaaaaagaaatggaaggtcgtgatattcagtacatgatgagtttctgggtcggaggcgaggcgttatgtcatgccgtaattgcggaaagcacctcagttgatacatgtcgtgaaaagatcgaacagtacgtgaaatctttcttgcattgatgaaaaagcccttgacttcggtcggggctttttgctatattggttctatcgaaaacaatgaggaatacattatgaaatatctactacttgcacttagtcttatgaccacaaccgcaattgcttcggaacctccaaccgattaccaatcatttaaagcgttatcaaaagaagaacaatgtacgtatcttccatcataccaaacgatgtatgattggattacgttatcttctgattacgatcaggtaaagtcaaaaatcgttagtgactacttgtataacatatcgaaaggttgtattcttaaacttcaactgcaagtggatacgatgaaacttgaaaaaatggaaagaggacaataggatgaactgcgtatacatcatcattgaaaaatttacttctcctgctggtaacgttgatcaaacaacagtctgtgctgctctgaatgaagaagaagcaaagcataaagtaaaatacctcaatgaaaatgcaattattccttttggtttcaaaggttatactgtaaaatacgaatatgctgcgatttcgcttgaaactagcccttcatggctacttgatatgaaatgaggttaaaatgaatccttatacaaaatgtgggatcatgtccctgttattaaaagaagttgtgaggttctatagccctattggtaaagtgtggtgtgtatctatcgggggtagacaaatcggatggatccgccgtggagatacaatcaaaggctggcaccaatacactgcaatttctattatgggctgtgaatatggtgagtttgataacttcatgcaagcattgtcactgttcatagataacgctattcacgagatcagttcacagggttccaaagttacaaagtacatggatactctttatgtgaacgtggaaaccgatcgatattgcatcatcaaagaagcactatacgatgataatgatgaggtgtattattacatcgtatccgatcaaaaccagatgcaaagttatatctccccgtttgaattgcgatatcaaacactaatgggattcattgaattctaagagaaagccccaaccgaaaggaaggggctttttgttatgatgcggaaagctgtagtttgatttgctctacgtcatccgggtcatcaatgatgctgtaatagatggttactgttactgagttatcatcatactgtggaataacttcaacagaaagattatatactctaggctcatatgtccggatcgcagatacgatagaagttctaattgattccgctgtcagagggttcatgttctcaaacagcatatcactaatagcacaaccaaagttactatcaaatggacgtgtacccttgatcgtggttacgataccaatcaaactatttcttactgctgcggccccttttgaagccgctacgtcattattccaatctcgttgcatgttaggttctatatcgctatatagcaacctcagatttacacccatttagaccacctttaaaaattgctgtaagcctctcagagagacgatatggctatgtccacacgaacaccttaccggaatgtttgcgaccactgctggcttatccagggcggtagaaatcgatttataggttgcatagtcgattgcatccaacaccatttctttatctttgtcgctacaatcactccacatgatctgttcgccgtctatcattacgtaatcgataagatcggggatctcttcatcaccagtcttacgagggtgaacagatagcgcgatcccgtcattgccgtatagcttatcgtcgaaatcttcaaccatgatttgattgcgtttaagctggaattctattctttcctgacattcttcacagttgatgaacagttgacgggtatcgatatttttactttccagaagtgccagaatgaaaagatattctctttgatacaggtaaacatcccctttgataaaatctgcattgggggtaaactctgtatgtgtcagaggacgataatcaacattatatttctcaacgtgtttatattcatgctttctcatttaacagcaccttgttttttcaagtcttctgcaagcaatgcagtataaatttgcctttccattgggctactattcatgataggttccaggttcaggccgtttttatttagcagatagttggtcttcacaaattcatccagatccccgcgactaaacaggatcttgaacagggttaacataccactaaatgatttaccgcgcatagacacatcaaccgatttcgttagcatagtaactattttttcgacatcatcaagttcgactatatcaagaatattctctttcgtttcttcggttagtgatgtccattcatagcgctgttcgttgtatattacataactgatacattcaagaaacaactcttcgcttgtattgcgtgtacgggggaagttaaaccctaatgtgatttcatcattcagcttgtattcgttttccagttgaatatcattaatcaccatgaaggcttcggagtggcccccacctttaccgcctatcacaaccttgataacgtttttaccgaacgaaccacaatacacccggctgaaaatgtattcctgttctgttttggaatacccaggataaagcagatccagcacttcatccagtatttcctgttgctctttaaggggccgaccttccatatcaatacgggtcagcattaatttaaactgatctttaactgtaaacatagggaatcgtttgatccctgatggtaatgttactcgaataatatcaaacataagatcctcaaaaggggccgtagcccctttattgtcctgtaattgcggtacgtgctgcaatggctaaaccttcctctacggattgtttaaacccttcccagccttctttatcagcctcaacaacccatgatgttttataggcaaaatcaacagtaaatgtccagatttcgttgttgttctcatagctcaattcactgttactgattttgacgggcaagcacttctgaaatacgtatgttgtatgcggtgaaccatcacgatcgtgtaagttaacctgaatagtacttgtcacttcatcaatgaaggcgtattgtcctgttacatcatcgcgaatagcggaaatccattcgttaaagattttcaggttacgggcttctgaatcggtgcggaacgtcaatgacaattccccattctcagggcgagtgaatctgatttgaggtacgccaccattataaacgtattcgtacccaatggatttaccagggaggttaactcccataatgcttaaacccatattatacatcatttcatcacggaattcagatagcagttgtccatacatgctatcaccaaacagggaagtaatcaaacgggggctaattgccccgatgattttgctaaatcctgttttgttcagcgacataatcgccttatcgacggtgtaactaaacaatttactcacaccgccagtgatagcattaatgaattcgttcgggttgtttgcgttgatagaactaatagatccatcaatcaaagtatctcgaatactaccgatcgtgttgtcaaggatacgtgatgcagggctggttgcaaatacaacgctaaacaggttgctacgctgaaaatcgcgattagccatacctgataaaaattcatcgacgttgtaaaacatcatatctccttagtaatttgtatcaaaaatagaatcctgacgcatatcgatcagttccataaattgaatttcgacctcaagtgagatcggggtatttggtgattctcttaatgtatttacaatattatcaatagaacgaccaaagcgaacactggtaatacctgctggcccaaaggttgaatgaggtaaacgcaaggaatccccagactggaaatcacgaataaaccagacaggaggcgatttaataacctctacgtttgaaatgaaatcaaccacgtcattacccagactattatcaaaatctgacgctgttactgggttactggaagggctaattgcgttcgcggttttagcacccagaacaccgtaatactgtttaaccaatgcagcaacctctttagcagtaccgccagaagttgtaccatatcccagaacagtaaacagatagtagattttaatcagttccagcaaatcattacggctttcgatcacgaatgtattgtaatacatctttgttcgcttgtcagaaccctggaaagcggctttagtaccaacatcaagggcttctcttcggtctgccataataccgcctgaaatggattctacagcgccccataccatgtttgaaacaacacggctcaaccctttggttaagaaactatcgtttgcatcttgatagcggtggctgtttacttcgttatcgttcaggcttcgcggtagcaggatctggcaaacaggttccatagtaccaatagaactattcaacacttgtttgtacttaacattacccgtcgcagatgatagtatttgttttgggttctgtgctgcctgacgtaatgaacgatagttgtctttactaccaacaccattaaaatcatatgcagtgaacagaaggccgttattatacagactcgaagcattataagcgttatcgatacctgctgcacgttgggccggaaattcggcggtaacgatagtttgctttaatactgattctgtgattgcggcacccccagaggggataccgcgatttttaatatttttgagagtgtttatactgtcatcaataatagaaaacttcattatatgttccttatgccagcgctacgagcggtttatgctctgtgcgttgtactgaatgagttacgttgttgttaacagttttgttgttaacctgaatgttgcttgctttatcagcatccggtttatttgctgctaacggtggctgtgcgtcgatcggggtgctggattctgtacgggctgcaatcttgttttgcaattgctcgataaggtcagagattctatccttctgtacatcgtccagattaccttcattacgacgtttttcaagctgatccaacagttcatcgttaatgtatttgatatcggctgcatccagattttcagagttagcatagttggttgctttacccaacagatcatcaccctttttctcttcaccttctggcggctgttttccttccttcctcgcttgttctaacctttttgcttcttctatacgtgcgcggttgcgtttgttttcctcatcggctaatttttgtgcttcctcttcgctgcttttagctaaatcgtattgtttctgcatttcttccgttgctttcttcatattatcaagccgttctttatcagcatctacggttttctgatttctttcttgataatcagtaggagcaactttatagatagaaccattaggaatttgagaaggagttattgttaatgcatgacgtgctgcaatagctttatcttctttttctaatgccgctttttggtcttctagttcctgtttcttgatcataagaatatcttctttagtcaattcaagaccaaatttctgtttatcacgtaaagcggtgatctgcattccgcgtccggcattggtaatgctgtctataccagttgattcacccaatgattgaataagacgaccgataccctcagtgattgccgtttgtacagtttgtcccaataacttcataggctcaacgaacaagtcacgaagtgattcgcctaagttgttcatattaaagttgttcaaaccttcttcgatctttgttacgatagcctttacgttacccagatatgtaccaaatagtttttttgaggattccccttctttcaggatatcttcgaaccatttgcgtattgtgacgcgcaacacatcgaatgtaaagattaacgaaccaataaggagcgtccatttagcaaactttgccattgcttccagagagtaaccaatgaaacggctaaggatctgcgatgtaaagcctttaatagaaaccagacttttagcaatacgatccagagttttgcttcttttgtcatcatcatcattgatgcgttttttcttagtgtctacatacggatcgggttcttccactggttcaggaagcggcttatgcttatcagtattttcatataaatcaacaagtttgttaatagcatgaaaaatagattcggtgttttcttccagcttaccgaactgtccattttggttaacgtttactgtattgtcaacagtttttgaattatcatcggttaaggatataggacggatcgggccgacgaaatcaggtagttgttcggctaatgattcctttttatcctcttcgtattgttctttgaaccccgcgaatttgtcacggaatttttcttcgaacgatttcaacccttctttgatatcaagagtattgattgcactttcaagggtgttatcgttgatttcctttaggtcacgggcgctttcagcatcaagggaggctgttactttggtgaccgctggttgtttgttgttgtttctgttcagaaactttttcttttgttcttcgttgaaataagagttagccattatcattcaccaatgatgttaagccctttgatggttttcccctcatgaataatgtatacttcctggaggacaccacgcgatacctgatcatattcgaatcggtacaggcaattaattaattcgtctcgtttatcctcagttaattctactggcttaccgtcaacatatgcctctttgatgaggaacggaaggtgagcatttaacaggctgggtttgtcaaagactaaccgcacattgtcaaacgtaaaatcatagcaaggttcggagattttgaggtcatcaagatttagcccaatttctttaagcgtattggcataatcagcgttattgtgtgcatacatatgaatcaacacaaattcaatttccgctgctgttagttcacgcggtttgatgtcatcaatgatgaatcgcatgatcgcaactgggtcatctttcagagtcttaatctttacaaaatgacgatacgacatcttagggatctcaatggctgttccatccggaagatgaacggttttaacgttagtcttcttgatttcaagccgtgtagtcataaatttatcaagagttttatttttcattattgcctcaaattgaacctgggtcattatttactatttagtaaataggatatattaggagggatttttatggctgaaaaaatcgtcaatcgaataacatcgattaaattatatacatcatacgaaaaatacattgataacgcatatactgaattgctacccgctcttgtctcgtttagtgaaaagacgatgattaacggctcatcggaaacgctgatgcagatatacgacgcacagttaatctatcagcaacttatccagccgatcatacaggtatctttccagtataacggtacacaggaacaacattattacggattgctttactctaacgtagatactgacgataaaaaccgctctgtgctgcgtatgaacctctctccgctgcataaaacgttcagacgtaagtttgcccgttcatttagtaacaacgccgtacagacgattacagagtgtatgacggcactgtatagcaaaatgaaactacttacccccgaagttgacggcggtaacatacgtatccctcctggatgtctaaatggtacatatcaggatatattcgattatatcagggacaacgggcaaagtgtagtttcttctgatttctgttatctgtgggaagatggttccggtattttccttaaaagttcaactgacattctggcccagacaccgatcccagcatacaaatttaacgttgataacgtgtttgttggcgatactgtcatattcacagaagcccagtacattacccataaggataacacaacgctgtttaaagacgccagtttctttagtctgtcattgactgataaaaagatgtacggtgatatactggctgatacagacacagagaatacatggatcttcacaaaccgtaatgcaatctatgataccaactttcagaacccagattcagaaggtaaacctttccaggcgtctaaaatgcaattgttatccagctatgaacgccggatccgattcgatataaagcagggtcgtttagatgttaaggtaggggcaatcattgaggtatttggggaagagtatgcaggaaaatatctgatcgttgaatgtgttcgagacgtatcaaaagatttccacctgcaaacacttgaatgtatacaggtgggggaacctaccagcgccgctactacgaacacaactagcagtacttaatcctcaaacaatccgaggtggagatcgaaaacattgttattgacctttttacgggcctttatgatgttttcgtaatgttcgcgtggcaactcaaccaaaaaacactgtctgtcttctggagcattctcaacttgtgcttccagaagcggatagttcttaggatcatcataatcaatgttgttatcgagatccagaataacacaacgccaaatttccggctctgctgatgttttaacagtttgaaccaatgacgcgtttttcaatcccaaacgatgcgaaagaatttcatgggcgaattcagggtcatcataacggatctcttcaccattccaacgaataaggcgaacggttgcactcaatttaaatttgctcatatttcattttccttgtcatcaattcacgtaatttcttagttggcgctggagggtttttaatgatttcctggatctgatcccatgtttcgggggatacttgttccttttccatcacaactatatttggattatcgcaacacttaccaacaagaacagaacgcccacaattaaggcaaatcgtatcagggcattttccaagtttatcagggtcgatagattcaaggaatcttcttgctaccgataaccgctctttaacttctattgggtcatattctttatttttcatgctaacaattgactcccctcataattggtaggaacccgacaggcaaaaaacaattgttggtgttcccagtttttacgcgcctgttctggagtatcaccccatgcagcatcaaacccagttttcgcacagcaccagcgaagattcgggtcttcgctgatagtttcgaatatttcgagtttcttactcatttcaggtcaccgataatttccatcgctgcttcgatgttttcaacaccataaaaggtattcccacttacttcaaggagtttgataccatgaagataaaccccaaccagcgcaccgatagcatcgtggatagcgtagttgccgttttgaagttgatttgcagtgtgcataactttcatgatgtttctcctttcgtttcgatgtaggtaatgtaccattacattacccagaacacaagcattatttttcgatttcgtagcactcttcaacttcgatgtttaccagaggtacttcgatatcccatgaatccgcttgtgcatcgtatacggctttgtcttcgtcgttcagaggcagacaagtaacccaaccgtcagtaacgcgcatcacgcgcattttagaaaggctttcgagtgcgtccgctggcagtttttcaccaccgttacccagttgtgccaaacggtcttcatttaccagaacgattactttgccttcgagttctttagtgatttgcatgggatgttccttttgtctgtttcgtttcgatgtgtgcaatatacaaaaaagccccctgcattgcaagaggcttctttaacaaaaagtgctattaaacggcttctgttttcacttctaaaccaagtttagcaagcgcttcaactgccatgaaatgattttcaaacggaacttcaacagaaattcgaattgttggcggtgttggatcagtcagatattttgtcatttgacgatctttctggtttttgcaaaggatatccgccagcgcttctaccgcgtcagaattgaaatcgtatgcataatcaagtcgggattgcacataacgcatgttgcgttgaacataatccggatattcttcaacgatcggggttgcaacagccgcttcgctcatgcattcaaagttaggttttcggaaaataccaacacacttatcatcggattcgttatatacgaaaataaatgcgttgctgttcatgatatgaacgcactgatacaccggatgtcggtaaatcactttcagtactttcttcacagaaggtttgataatgtgattggtttcgaagcgggaaccttcggttactgtcagcagagattttacttcgtcgatatgtttaccggacaggtttgccataagggttttgtgtttctgataactactagtcataatatattctctcagtgatttacgtttcgatatgcaatataacaaagcccccgaccggagtcaagggctttttattaaaatagatctgcaaagacaacatgaatatcgtctggttcggtcttatcgcgtcttatcttcttgataataggaaggaagaaactgtattccggttcccctttcttacgcgttttcgacttctggaggccgtcaacttccatttctacaatggccccaatgtattcatctttatgcgccatgatgtattcgcgatccagttcaccacgttcatctaatggaatgtatacacgggtaataccatcatcatcgtaacgataatcggtatcagttaacccagatccggtattcgttcgagccattccggataaatcttccaccacaaacccgccgaccttatggtcttctttagtgtgcgcgtagatatcaatgatccgtagttcaatcggggttttgtttttcagcttaacctgatcggctactcgcgaatctttccatttgaagtttctgtttttgagaatagaaccttctttaccgtcattgcggtaattgttatagtcctgcttcgcttctgcaatgttattaaccagcttagactgaatcaaacgaacagaaggcagagaaagatccaggaggatatcacgcaacaggctaaaccgctcatcataagtctgaacactttcagcttcgccgtaatacacctcatatggaataatatcccaaacaacataaacaatgtttcgctgttcttcttcggtgatcgtccctttcagagatttgtttacgatcccgttcccttcttcgcgttttgcttcggcctgttcttcttctggggtcgatactttgcgaacttcttccgcaaataacgcaatgtcgttatcatcatcgtccatgaaagcagataaagaaaaaggcatgtctgtttcaggttcaggtaatgttggtacggttccggaaggaacataaatcaattctccatccagaactacatcatatcccagataatcgcgaatctttttcagatcgatatcaagctgagttaacccttcgtactcgttacccgccctcgataccttacggtttaatgcttccagcaaatcagccatgcaacgcgcaccatcggctttaagctgcgagtaagcagggaaaatgatgcgacgtaaagccttttcactaaacggcgtagcgaggcattgaggctgttcaggaatgagtttcttccatacccggtttggtaaggttgtgccagcaccacattccagatcgcggttaatgatacggcgtagcacttcacgatcgttaatgttcactgatgatacaatatccagtaaacgatcacgcgctgcattgcctgtatatttccggcttgctaaatcttccagtaatgctttgattgcatcggaaagcggtgttgtacctggtttcccttctactaaagggaactggcgcacataaaacataatctgttttgtatacgtaatgcggaaaacttctttcaacaattcattatctgcattacgttttaaaattgcttctttctctttagttttcagagtggaagcaagttcattaaggattgacaagatcatttaatttctcttcaatttcaaaccacgattttactaactgatgaggtgcatttgtttcttcacgttcaccacgtaacatatggaataacggcaactgactaatgacgttatgacattcgtttaagtttatcgcgagatcatcgacaaagcaaaccagacgattaccatactttgcttttgcttccaggtaacgatgagtttttgtttcaccgtggcccacgaccatcacctctttaaacgcagacgggaaaagagtattcaggttagcaattcggttaaggcttgccgttggtgttgttcccagagcggtaacggcaacgaaatcatattgcgttttcagacggttgatcacaatcaatgcatcatcatacgcgttcagataacgaatgaaagaactgttattgtattcttccataaggattttagccaactgctgatcacatccgaagatttcggtcatatcacgaaatttttcatctgtaaccatttctaatgcaatatcagtaggcatgttgtgcttagacaaaaagaacggcaatcccgactgccattttacggcgatcccgtcaatatcggtaagaataacaggtttcaagatataacctcataacgatcaaagaaaagggtacttttgaatgcattcaattcacccaggaattgttcacgctcaaatgtccgataatattcaaattcgatgcacaacatatcatcatttgttacaccaatgccaacgacatcttgatgatatttctttgcctgttgaagcacgaacggatcgagatccgaacaatcgaaataaactacgtaactcatatcaacccttatacatataaacagcatctacccctgcatcaaaatcgactttatcaaagacaacgccgtttgatgcacattccttaacataggattcaataacaaccatgttatttgcgccgatggtaacataatacacacctgctttatagataacactctgaatcaacgttgaacgtaatgcatgttgtgcatacagtaacgctaatggattaatcgcgcctttgaacaggaacacgcattctactctttctttttcactcataacagatctctcaatcgggttaaatttcggacaaactcacgttcagtgagcaccgtttcattcatcttattctttcccattgaatgtgtcaaggtactttttccggttgctgccagcgcacggcgaaacccttcattaaggaataacgcattatatgcgttttcaatcaggatttgatacgcctcagaggaacgatgaatagggatacctttccagtataaggtctggttagtccaccattttttctttttgcctttgaactttgcggccttgcctaccagagtacatacatgggcttgcatatctgggttgctaaatttcaggctttgcaaaaagccctccattgatgcacattctaccccgtcaaacgtgaatggatgaggagcaaagttgctcaatgcgcatgatgggtactggctacccgaaccaatgtccataatgaacctccgccgaaaagattaaatcatacaaaccccgaccgatgataacaccaacaataattgatatccacgctttccaattatccacgatcttcaccttctttcttcccttcctggcgagcgcgtttgcgtcccgctcgtactaaagaatcatagtacggacgtttgcgatcgatgttttctgtacgatacgctttaccaaaatgactcgttttgaatccgtagtatttcacacttccacctcatgggggttattgtgcaaaccacgggccggatcataacgatcataagttgtttcgtactctgatttaatggatacatcacaacgagtgttccattgttccagagcgcttttaatttctttcactgagtcggtgaaaaattttacaatactcgccatacactaccaccttcataaaatgcatttagtttatgtaacatttcgacacgggctgattcttttgcggggctgcaagataatgttagaaccaacccaacaggacaatcaaacgcagtatcaatcgttactctttccagacgttgcccgtgatcacgaatcatcttcaaaaaggtatcagataactcagtattttcgtattccactttatatatgaatcgtgccataattaaccccttacacatgaaagataagaacgcttcttgaacactttaacttcgtggcccctaccgcttgcagcagtgttaagagtttcagtgtgacgcgcaccaagtaccagagttttaaccggagtaacaggagcagcgataacgataacagcggcccaacgagcaccaacagctttatcagtacccatatcgatagcagcagaagtatttttaccagccgccagaacgtaagcacgtgcttcacgacgagttttgaagaaaaccagttcattcatgttgtaagagcgtttcataatgtcatcctcataaaagtgttttcttgtctacgggattaactataagggaatgtgagaagggagtcaacaactttttacaccaaaaacgaaaaaagccgctacctttcggcaacggcttgatttttaatatttttcgtcaggctggaacaccgcacgacacgcccacatagaggcttctttcagtcggtctttcgctagttgaatttgatggatacgttcaagcacctcatctaattcttcctctatcagtgaatcaatatctgaatttgatagtcgctgttcgatatcttccaggattgcacctaatgcattttcagcatctttgatacggtttaccgtttctacttttttatcagtatggggtttataacccttgatatcatcaattgccattatagactctctgtaaaggttcgggcgataacgtcgcgttgctgttcaggggtcagcgagttaaaacgcactgcataaccagacacacggatcgttaactgtgggtatttttcaggatgttcaaccgcatccaggagagtttcacggcgcaacacgtttacgtttaaatgttgtccaccttccaccttaacagttggttgatattcgatctcaatctctcgcttttcaaacggagtaacgcgagctttaccgatcacagaatccatagttaatgtttttgatactacgatccgaacgtcgttaccttcttccagatagatcgtaccagtatgcaaaccttctaaaatttgaaatgctttcattgtattacctttacttgattacataatacctgaacgggttgaaatgaaacgccagcattgcacgatctaggttaactgggtcgctaacttcttgtttcagtttccatccagcataaacgcgcaaacagaattgcactttgtggatccgtagccacggtttgtaaacgtacaaaccccatgctgattcgttccacatgagcagatacccatgatttacagggttcggcccaccttctgtttttgggttgcctttccagttgaatttgcttgtcgcttcacgtcctaaaacgtgatatgcgaagttataagccttgtttctccacaaccagccaacacgctgcatgtataccccaaaatcccccagatgatagcgtatagacgcccaacggcggatatgtccaccatcaccatcaatagggttatcgaaggtttccatccaccggaagcctttaggaagatgccctgttttctcgttgtagaacggtacaacaaacggggcaaacagaattgctaatactccagtaataatgtcaagagggacgagtacgatccaacttgcatactttaaaaagcgcatagacaccccaaaaataaggctatccgaagatagccatttgattatttgtttgtgttgatgtatacaaatgattcatcaaattcactgctaaccgcttcatttgtaaacggaatttcaggatttttgaaaccaccactgataagatactggataaagaataccgaagtatcaagagaaatcaattggtgattgctcggagatatatttgttctacgaacgagattgacaatctcccaatcaaagaatcgttcgctatactctttcttgctatttacttgcggcgatgcaaagaacccttgtttggaatatgcctcaagcgctttatgaagttcagaatcaaaatcatcgaactcttttgcaaaaagttccatcaattttttattgcgattcgttggattgctattttctccgatgatttttctaattgccggagacatttcaaacagtttttgtaaatttttcatgttatctctttaaatttcgtatgcagagtcaatacaagattcgtaaagctgttctggcgaattctcaatgagaggcgttgttttaccaaaaatatccagatcgtaaggatcatcatccacataacattcattgaatttgaagttttttcggtagtccccatcgggcaatccatctttccattcattaaatgtcatgccataacgttctttgaattttgcgggagacatatcaacaaaaatctgtgtatattcgaccgcgttatggtatttcacagtttcacgaaatttcatataaacctcattaaaattagtgggctgggagtttctttacttcaccccgcattccggggaacctattaccggataccaacagagccttctccgtgagaaaggttgcatattccgaaccatttaacggcattgcgctacgcaccctaatttggtggcaagggtaggatttgcacctacaaccaacagaatcagattctgttcctcccgcttctctaagtgccttgccttgtttggtggcccctcccgtgacttgaaccgggaacctaaccattatgagtgattagctctacctattgagctaaggggccgatatttttagaactgtttgcggtagatttcgcgaacagccggatcaacagctttggcgtatttgcatacatcctcgaactgtacgatgtattccattacttccgaagcacgggaattcagttttccctggtgagcatcaatgatcattgaagtcattacatcgatgcgggtcggtgcttcgaggatgtcgcctttgtcgaaaagttttttggattttgcgacggtatcggcgatgattgcttgaatttgtttagccatgttggatctcttattcgtaaattgcttgaatcgctttatagtgtgcggttacatatttaaccggatacttgcgagcttcttcttttgttgcctttcctgcaatcagttcaggatccggcacgtttgccatttgtgcatgaggaagcggtacgcgcttacccataagcagggttttatattcttccggtacatccggcccacatgataacactgtgccgtagatcggttcctctccgtgttgacgaacaccagtcacaataccagaaggtgatacaatttcagttccagccgctttagcgttggtttcaatcaaaacatattcaaaggatgcttttacactcagttcagacatacatttactcattggttatttgatccggaaatgtttattcatttcttcggggtcaagttgtactacttcggcaccgtattgctgtagacgccatatccactcgatgcaaccacgatcgtatttatgtagatatactacacgcttaatcatacctgttgcaacacaaaattcgatatttttcgcacattgtgagcaaggggaatgagttgtatacaaagttgcgtctttgatttgttcatgagacgccgccagcataataacgcgcatttctgcgtgtacttcgttgcgatctgaccattgtgaatgttcagggcgcttttcttcactcagtttcccgttatcatctaataagtgattgcactgatctgtacaacgatgactaggatcaaccgtattatttgcgcctacaaacacacgcccgttaccatttctcaatgcagcaccgacattaacagagacacattgagagaacttagaagcgcttattgctctaagcataaacataatatcatcaatcttcatgatacaccacgtgataaagaactttccagtaaacttgaatctttccatcatctaacactcgatgatgtgcagaaacagaactgattactactttttctggactcggtcgaaaacaacttgtgaattttcgaacaaggcaagcaatgaaagtatttgggttgtcgatttcgtcaatgatagtattaacagttacttcaccgaaatgacaagggatatcatatgcttttaatgcttccaggagcaccatactcatagagccaggatgatcaagcatctttcatcacctttagtagctgtttgataaaatcaggagtcgcttcaacgatatactctgaaccgttgattgtagtaacgcgaacttctgtctgatttttgttgatatcatattctgcaatcggacttgttactacatcaatatcagttcctttgatgtatccgaaaacaccgccataataacgaggatccgggtatacagattcgtccgtgattaccgctctatcaataatttttacgttcataatacagccgcccatgtaacgtagccagtaataggatttaacaccagcccgaaagattgggtgctgttagtatccacgtcatgaatataaacaatataggaatactgagaaaccggagtggcgctaacttcaaacccgcccggagctttaccctgttcctgaattttgttagcaattttttggcacaacaaacgaactttttggttaaaatcgcccagattttctacgcgaatgcgatcgccaagttcaaccatgatgtttttatcttcacgaataacgttcataatgtaatcctcttttgttgtgggtactttaacatacccacattagatgtcaatcagaaatcaccataatcgacttgtaagcacggaatcccgtttgctcgccacattccgaccggagtgtctctatcgtccactgcaataacaggataatacttatctaaaatcttgtcaaacaaaatttcttcttttacttcaaaatccgtcctggtatcgccttcttgacgcataaaaatttcatccggttcaacaccataacttaacaggctaacccatgtatcatgtgcgcattgcggattaccttcacgcccagatacaacgatgcatttataccctgcatttttgtacaggtgaaacagttgctggatcgggatgtttggcggatcattgatcactttggtaaagtcatacgggctacgttgtcccactttggttagagtaccatcgacatcaaagatcacacacttctgattgtggggattaacaatttccattgctggtacgaacccacggatcttacgatactggttaaacatttcccaaagacgagaaacgggtaatgcatcacgaccgcgtttgtggttacggcgaagcaattcaacaatggacacatcaaaatattcaatatgaaaatctgccttgtgttccaacgcaatttcacgccagtgatttttatcactttctttcagatgtgtgttgtgtatgatcacgtttttaccatctttcagagtggagataacaacgtgatcctgcatttctgcaatcatgtcttctttcgctttggtgtatttgtatccgccagcacctttacccgcattatacaaagagctacgcagatcatcgcgagagatcgtaacagtattacccaattcacgggctttctcatgcgcccaggtagtttttccactacccggaacgccaatagtcataaacagattcatttcactatctcatattcaattagttctttgttatactcattcgtcagattgagccatatatcacgattccaatcgttttctatccatagaccttctttatcctttttcgcagtataaacttttccttctgttatgtcacgaaaaaacgttttggttattttgatttgcatttctcagggtatcccaacgtacacagaacattatcggtttgatccttttgtcttttaacgtcattcatccagctacgaaaaatcaatgaatctggatatgataatgcaacataaggatttccgtcatagggcattacaaggtattttttaccgtcaatctctcggacttctgcaaccactttccatttcacattcaccggattcaccttagcggggagcgtaggaaaaatcttttctgggggcttctcagcacacccgaccaacagaacgcccagaacaagggctaacgttgcaattttcatttgttacctcgatggtcttcaccaaacagttctaaagcctttttctcataggcttctttcgcttcttctattgtatcatagctacctaagtatattcctttaccattatggcgtatagtcgaaaaatacctatcactgtttgatattttttgaactcccttaacacctgttcctgttttggtttttggttcgcctcgatttcgagaatttcttgctggtgttgcttcacgtaagttttctataccgtcaccaaattcaactcctttcttatggtcaaccattttagggagatatccatgagcaacatagaagatgaaacggtgtcttttgaccttaacaccgttacaacaaagaatagtatatccctgcttatcttttgcgccagcaggactaccaacagcaatctttttatttgttgattttgtccagtaaaccattccggtttgtgtgtctgctgtcatatattgcaaaagataatcgcatttttcctcatttatcattttcgaaatctctcatatactcttcgaaggacttgttgatcttgatttcgatcagtcctggttttttaaacagcagatctttacgtccggcatccttgaccaactgctgatccttacctttttgttcgacatagatcacagtattgcttgtatttgtctcttttactttcttcacatcgtcttgcaaagattttatatccttgcgtaatgatgcattttcaattttggtatcgactgcaatgtaaaaaagggctatcaaagatagccccacgattacaggccatacccaagatgatatcttaggcattatgaacctcatttatattgttcaggaatgaactggtcgtaatttttaaccatcatttcaatgatgcggtcgaccagtttttgcggatcggtttcttcgaaatacttcataagaggcccgaagatgatccgaccgtcgtttgacaaatccgcgcttagactgatagcaaaatctttacgcgatttccctttgttatcttcaatagctttgaatgcttttgcactcaaacgattgagactatcaaggaaaagtttttcgaaatcgtcaatctttttcagagagaccagatccgaactgaatagctgtttcaggtcatcgaccgtattctcaacaatatttaggaaaagatccttattgttggtgatgctatcttttgtgcgatgcaggttgacataccagtttgttttgatttttacaaaccctttcgttgtcagaacaacatagccttcgaatccttcattctgatatgcttcttttgcgaatgcatccagatccagtacttcgatattctcacgcttaaccagatacgcacgtaacagcgcgtcagcaaagagttcatcataagggatgtattcacccgtgatgttgtgacgaacgttcaggatacgcagatcaggagaatcataaccaacgacaatacggtttttcggggaaacgtattccatgttcaccgtatagttttctttagcgatctcagttaagcgggtcagcaattcacgatttgccattaacacgctgtgcgcatccatagcttgttctgatttaaccgaacctttagacttgaccgccagaaatccaccgtcaaggaaagttgagatcaaggaaccatcttctttaatcatcacgtctaaaacttcgcctaattcaataggagactcgttaagcgcttcccatgcctttacctcggcatagttaaaaaacttctccatagggcggctgatgattgatactggggtatctccatccatttcaaacatgataccgcgacattccagagcaccaggctttagccagtctgtatatgaggccatgcgatagttaaagattctaacaggtgtacccatcacggttacttgatcaacgaagaaaaatgtttcggattcaccacacaactgcatgagttgtttgtaaagggtattgataattttagtttgtgcctttgtcatagtgctgtttattccattcagggttgtattttcgtatcatgttgatttcataatcatgatatgtattttcatcgtgagtagtcacgataagtttcacagtttttcgttttttgatagccatttccaatcgacacgtttttaagatgttactggggttggcttctctccaatactttgcattgcgatatgtgtctaaacgcttccacatatccctacacttaccaacatatactatttcatcgttaattgcaataaaataaacacaatgcctaagttcaccacacttaacaaaacttcgatcgatgcgaccacatttatcaagggttaagttgaattcagatttcatacattatatatccaaaaagtcaagtgatcttttcttaccacacaaaacattaaccacatgcgcgatgtaatcaccgtgacagggaagaggcgcacaggtacaaccaagcctctttccatcaagttctttcaattcttcaatcgtgatcgccccagtacgaacctgattctggaaccaggggataaacgctaaaatgttttctcccctggttcctgtgtgataagggtttccgaacttcgtacctctttgaatatcgacatcccaatcagttttgtacttgtttactacccgacaatcacgcgtatttgctggcccattttgcatacgcttcatcactgatttcagtattcaagtttccgacgaggtaagaacttacttcaacctcttgcggggcaacctgtacgttatcacttttgagccatttattcatccacggatacgggttagggatcggggtgaatggcgaatcaagccctaccgctcgcatacgctgatctgtaaggtgttcaatataagcgatagtgcttttcagcgatacaccttctacatcaccaacagagaataaatgttcagcccattctttttcctgttcatatacttccaggaagatagccgttgcttcttttttcagcctacgggagatttcaaccatttctggatcatctttacccatttgccacaaacggattttactctgagtacctttctgatgcaatgcttcatcacgcgcaatcaggcgcataattttcgcgttgccttccatcttgccttgttcagcaaagttaaaggtgaaactaaacgacacatagaaacggatcgcttccagagcgttcacagcgtgcatacaaaggtacagcgcttctttgcacttagtggcctgtttagtgtattgctcgttataatacacgacagccggatcatttggtttatagccgctaacctgttcctgtagcatcatgatggttttcagcttatgacattcatcaatcagagtatcataataccgtgtcattgatgcagaacgtttcataatcgcttcattgcgaaggatttggtcgaactgtacagaaggatcaatgtgcaagttacgttgaatatgcgtgtaactacggctgtggatggtttcactaaacgcccacgtttcgatccaggtttccatgctcacatcggatgcaattggcaaaaatgcgaggttaggcccacgtccctgaatggtatctaacagggtttgatactgtaggttagaatcgaaaatgattttttcatgttcaggaagttttgcatactgcatacggtcagtagacagatcgacttcttccggacgccagaagaaagaaagctgtttttgcgtcaggctttcgaaaactttgtgtttctgcgattcataacgtgcaacaccagtatcttcaccaaaaaacataggttgttctaagtggttatgatctgggtttgtattcattactgttaacatgtctttacctttaaaaagcccccgaaggggcattaatcaaatcttacaacccgcgcaatcttcggcggcttcttcttcatcaccagcaccatcacgcgtattatgatagtacagagttttaacaccgtagtagttagcatacagcagatcatcaatgatgtcttctgttttaactttcccgtcttcatagtttgccgggtcatagttggtgtttgcagaaatagactgatcgacaaacttctgcataactgctacatgagacagataccctttgttaccgcgtttagccatatcccagagcagatcatagaaatcaatctggttattctggttaggcacaacctggttatagtgtccttctttcgaagatttgatactcactaaaccgcgcggaggttcgatcccgttggtagagttactaacctgtgaactactttcacaaggcattaaagcagaaagagtagagttgcgcaagccgtatttcttaatctggctacgtaaccattcccaatcgcaattataaacaggtgctaccagttcatcaacggttttgcaataccaatcgataggcagtaacccgcgagcgtatttggtatcgttgtacaatccacatgcaccacgttctttcgccagttccatagaagcaacgagaaggttaaactgaaacgcttccattagctcatgaactttgtctgtatacgcttctgagtagtcgcaatagttgctcgctaaccatgatgcatagttggtgataccaacacccagagaacggcgctgtttagctttcagagcggcttttacagggtagttctggtaatccaacaggttatcaagcgcacgtactgcaatacgcgtgagtttcgggaattcgctgatatcagcgttatccagaacgatagccattagcgtacacaatccgatttcaccagccattttatcatcgtcatccagcggcgacgttgggatcgcaatctcacaacacaggttagacatacgaacaggaaccgtaaaactaccctgttggttgacgtgatgagtgttgaaaatgtatttgcgtcctgtctgtgcgcgttcctgtgctaaaagttggaacaggtcaaccgctttgatgcgtttcttacgaacagttggatctttttccaggctttcatacagttcttcaaatgcagtctgatcagcttcatagaacagatcatacagacgatcgttagcaacatccggactaaacagcgtaatgtaatcacgattcattaagcgtttatacatcaactggttaagctgtacaccataatcaagatgacgaacgcggttttcttctacgcctttgttgttcttcaacaccagaaggttttcaacttccagatgccagaaaggataatacagtgttgcagcaccaccacgaacgccaccctgtgaacaggatttaacagcggtttgaatatgtttccagaaaggaatcacaccagtatgaacagcttcaccaccacggattttagaacccattgcgcgaatatgtcccgcgttaaccccaataccagcacgttgtgaaatatacttcacgatcgcagaggttacagcgttaagagaaccaagagaatcacccgattcaattactacacaactggagaactggcgcgtaggagtacgtacacccgccataattggagtcggtagagacagtttgcgatcggaaattgcgttataaaaatcaacgatatgcgtaacctgtgctaacccagtttcttcctgatgcagacacatcgcaataagcataaacgcatactgaggggtttcaaagatttcgccagtatcgcgatcctgaaccagatatttcccgattaactgttgggaaccagcatacgaaaattcaaaatccttatcatgatcaattgcacgttcgaaaacttgaatatcttgcttgctgtatttttccaggatctctttatcgtatttccccgcttcaaccattttaacgatgtgatcgtagaacgggataggatcgaactgaccgtaaacgtctttacgcaatgcaaacatttcaagattcgatgctacgtattgccaatccggttctttaacagaaatatgatctgctgcatacttgatagcgatacgttgaatttgtttggtagtcataccatcgcggatcagttctaatacattttcaaggaatgcacgaacatcgatattatgaccatcacaggcccacttgagcactttgtatattttttctttgtcaaacggctggcgtacaccagaggattttactactactttaatgtcattcattctcttaccttgttaagaaaggggccgaagccccatttttcatactgccatttcagcttttagagagccgtgattatgatacccttctaaggttatcgagtcaaagaattcttgatctaaatcaagtaagctatttaccttcggcatttttagaatcggtaatggcattggtgaacggttaggctgtaaaagttcttttgcctgttcaaccgcatttttatagatatggacatcaccaccagtccaaaccagatcgcccacttcgtacccgcaaatatcagcgataatatgtgtcaggagagcataggaggcgatattgaacggcaaccctaagaagacatcaactgaacgctgataccactgtagagacagtttaccgttgattacaacgaactggaagaaacagtgacacggacgcaacgccatatcatcaagatcaacagggttccaggcagaaacgatgatcccgcgatcgtctggggttgatttcagttgttcaatgacttttgcgatctgatcaacaccactaccgccataataactatcatcatccccataaagagaaccaaatgaacgccattgatgaccatagattggccccagataaccatcttcatagcctaaatcaatagcttgtttctcatagttatcgtcccagatcgtgcgcttatcgctattttcaccccaggtcatccggcgaagttcttcgacattagtcgaaccggacaggaaccattgcaattcatgcttgcacggtttgaagaatagttttttacaggtagttgcggggaaacctctgtttagatcccatcgggcttgtgcgccgaaaatacgaatagtacctacaccagtgcgatcggttgattcaacaccgttatcaagtacaagtttaataatatccagatactgtttcattttatacctttttatatcgatcgactatgattttttcaatgcgttcatgttctttgatgtactgagtttcgaaatcagaaaattcatattttaacaatgcatcacccaattcagaagcagtaaacgaaacatcgcgtttaaatgcgggggcattatatacatcatgtccgtaaatgtgtgtcaaaactacttcatcaaccattttattattgattgaatctaaaagcaaccccttaccaccaatgacacacacatttttatctgggtgtgttgcttgcattgtaccaatagcagcagacaacccgccaccgtggatcacgtaatcagcaacctcgccttttttggttttcaaaaaactaccggaaccagacagaacgcaatgaattctaccaggcaatttacccggaagagaggtaaacgtatttgcacccataatcagaacgctatcggcggtttcttctttgaagttctgtaaatcttctttacagtggccccacggcaagccttgctgatatccaaaagcgaaatcatcgtggtagatatcatgccccagcgcaaacaccgcttttactatgctcatattgcgatccacattttgttgtcttcaacagttacaatatagcctaatgcttcaatcataactttcagtttttctttgtacttctcatcatatccgcgaatcttctcgaattcaacagagaaaatactacacccctgatattttgcattgatcacgcgagattcaatatcaaaaatcatgatatccagaggacaccaatcaacagagtgaagtttttcgcgggttagtagtgttgtgttcttagggagtttcattccgtttcctgttcattcagccatgattcgatacgagatagttcttcatctcgcggggtaaatccatatgatgcgtcgatcatcccaatctgatcccaaacatcaatttccaggatctcagtcactggaggattttgtgagatatggtcacgacatacagcaagagcggtattgatggattcggtgacagtcagagtgtcaccctgtacagatacttgaataatcattcagaactccatgcatttttcaaagtaaatctttgttgggaattaataatcgtagcgcgaataacagcaagtttcatttcttcaaatttatttcgcgtcatatacaaaccaatcaagggaaaatagagcctttcccattcgtaagtgtcgcttacttctttaacagcattgattaaaatctcagccatttgaaaatcggtaggaggaacccaaccaagattaatataaatccgtttttgtgtaccttctttcatattttccaaacgtaaccatgttggacaactcataatattttcctcaaataaaaagggaactgcgttaacagttcccattatagttcatttgattagtaagtcaagcgccacaattgaattgctgcatcaacttccttcttgatatcttccggagtgtctttgcgctgtgctttgactaacatagtcatcattttacgaatagtgttgttcatattcgctttctcacgtgctgcatgaacagcctgtgatttttccacttccggcgtatctttcttagccgcctgtggtttggtaggctgtgcgccgatttcgtctttctgtttcggtgctttttgctctgcttccttcttcacatgaggtgcggagaatttacccgccttgaagttagaattcatttgatctaaagcgctcttaacagtgttccagtcagagatcccacgtaaagatttcagagtatcagtgagtaggctaatgcttgcgcctttggtatcttctgcgatatcgattcctttcaaccactcaatgtgtttctgaccagagtacatgaaatcaaagctactgaatgagtagtatgctttacggtttacaacaatacgcttgaagttgatagtaacaccagcgccgttatcaaattcaacataaccgctggtaggcattacacgagcaccaatatcttttagtgctgcgaagtattcctctttaccgatacgattaacagtgcgttttggcttctcttctggcttcggcgcggcttcctgagcagctacacgtttaacaaaagatgctgaacgatgtcccgctgcaaactctgcgttcatcttatcgatcgcgttcacaacgccttgaacactcggtttcagtttctgcaactctttgaacgtatcaacgatcatatccaggcaagcgccgtcctcgtcttctaacatagttccgcgaagttgtgcagccggacgatacttagatacagcaggatcatacaccgcgctaaacacatacgcacctttacgcatcattacatgacgatagaaacgaactttcagtgtaccaacttcaacaaagatatcgtttccgctaatgtcagcgcctaacagcttacggaatgatgcaaggtaatcagcacgtttgtatttgatatttttctgtacagggctgaaaatgctttccagttttttagacgggaacaggctttccggagtgatcttatctgggtttttgccccattgataatcacggcttgccattttatgttttttagttccaaccagtacaaaggtactaacagaaacgttacccagtgcagatgaatccggagcggctaacccttgtccattcggaggggtgcagttgaaaccgaaatcaaagtaagcatcaccagaagtgaaacggaacgaagcataaacaccgtgactaccttttgttacttcctgtttgaaagtggtaggcaatccagtgtatttggtgaagtattccgcaaattcctgtgcgttaaatttggtgctgaaatagtttttcgccactacaaagtaagcatcaactttttcttcccattctttcttttgacgtgcataacgtgcgcgaacatcaccagcagtctcagaacgtgcgccactaggcccagtttttgtaactacgtcgtaagcctggttaattttctgcattaattcattgctaccaccacggtcggggtgattgcgtaaggatgcacgtttgaagagtctggacatttcagcgctggtttcgctaccagttgcgcccaaaactttcagtgcttcctgataagtcattttggattcagtgatcatttattgttcctcaaataaaaacaaagcccacgtttcgttacatgggctactttactgtatttatggatttcggtcaatagattttttcgaggaaccaaacagaacttttgttgttcttgattcgcgtcaactctatagggttatctttgaatgcttcctcaacatctttcatagtaactatatgtttttcttcaagaaaattgttgtggagataaaaccgctctatttccagagcggtttctaattcaaaagatttttctaataacataatttcatcctcttaaataggggtatctaacggcccatcaaacaagagatatgtttatgaactataacaaaatttataactctatcatagaacatgctaaacaaacgcagtatgatggatatacagaatcacaccatatcatacctaagtgcataggtggaacagattctgatgataatttggttaatcttacagcacgtcaacattatattgcacatctgttattagtcaagatgcacccaggaaacaacaaacttgtttttgcagcacatatgttaacagttggttccaataggtcaaaggaaagaacagctaaccgtcgctatgaatggttaaagaaaaaggcgtcagaagcacataggaacagagagttcaccgaagaaaccagacagcgaatgagtaaagccaaaaagcaacaagaaagggttgtatgtcctcattgcggaaaatcgggtataattggaaatatgactcgttggcacttcgacaactgcaaactgaaaccaggtaatgaagggttgaaacataagttcgagggtatcccgtgttcccataagaacggaaacgtacctaaagaacggggcaattgtccatattgcggaacagaatcgtcattacattatctgcgttcacatataccatattgcagaaataacccaaatagaaagacgccagcaaaaaggaagcagttgatttgtccatattgcaataaatctggtgatgccagcaatatgaatcgctggcattttgataactgcaagtttaagacttcttaacttccattttagagaatcgaccgacttttgacataacaatatgtcggtcgaaatcttccggatccaaatcctgatgactgataacaattacgttaccatttatcccatccaatagtgcttttacagcaaaactaccatcacgatcaattgcaccatcgtacacttcatccaggatcagaagggataaatcaacaccagaaattttactggttacatcgcgccaggtgaacaataaagcaaggttaatacgtgctctttcgccttgactgaacgatgcgtaactaaaatcattacgacccagcgatttaatcgattcgttaaattcgtcatccagagtgaactgataatcagcacccaacagatccagatagtacgcaatctgtttattgaagtaaggaatataacgtttaacgatgctcgctttaacgccggaatctttcagcagatccgtaacaatacctctaaaatatttttccttgacaaatccagaacgtttagaatcaagttccttttcatcttcacggagtttttcaactggggattcgtcgatcaccacgtcttcctgtgctttatccatgatagcccgaacacgtttagccgctgcaacttcattttgaagtgtaccgcgtagtgattcgtatttggatttcagcccatttagtgtacgttgttgtgttagtaaatcatccatgattttctgtagctgatcttgcttgttcttaatcagcgtaagtttctgagtaccatttttaatgttctcggcaatttcttccatgcgttcaggagtggggctaattggctgtttacaggccggacattcgccacccttgcgatacatcacctcaagacgttgcaactgttctacgttcattgagagccgcgtataaccatcacgcaatttttgaatatttgctgtttggtcttcgccattgatcacacattctgcgatctggctttgtagttcgaccaattgtgctttgatttgttttgctgtttctacgtgggaatcgtagatatcctggtaacgcgccgtattctgatttgcttttgcccgttgttcgtcaatgaacttttgatgtgttgcgatctgctgttgtacgtgtccaatctgcattgaaagcgtatccagttcacggttaacaccacggatgtatgatttgttcagtttgtccatttcactgatgatagacaaagacaacaaatcttcaaccagtttacggcgatctggtgttttcagttccatgaaaggtacataaccagcagtacccagaacgataacctgtttaaagcccaccaggttaatattcaacattgattcaagctgtgactgataatcaccagcggctgaatcttccggcagtttttcgccattcttccagatctcaaatactttcggcttttgtccacggatgattttatattcatcattaccgtattcgatcaacagttcaaccagacattttttcttgttgatactgttcaccagttgtccgactttcagatcgcgaaatgacttaccaaagagagcatatgtaagcgcttcgatcatggtggatttaccaccgccgtttttacccgtaatgagggttttctttgctgaatcaaaatcaatgacgatcggtacgttaccaaccgacaagatattttgataagtcaatgttttaaatttgagtttcatcaattatcctttgggatatatcactaatcatgtttgtaatcgtgctatcaaagcagtatatcacggaatcttcatccatgctattcaggacagtaaatgtccaaacctttgtttcgtgatagttgtctttaatcagagtgaaccccaatgacacatactcattataggaatcctgctgtactgcaacaatcacatcaaatccaaacattttataaagggctttatatcgcccttcttcgtttaaaatattaacgtaatcaactatttccattgctcgtaacctctgcatacaatgcactcattattgcagatacttcggtcttttcttctggagtgatctgcatgttgttgatgtactcactaatcaatccagatacacttttgatttcaaaatcagtatcgacttctgaatcagtgatcacgcgatcgacaatgttcaactcataaactgtttcttccagttttgtttgaaacttaggcaaatcgttatcaacttcgcgcacaatcaagcgaacagagcaatttttgtaatctgcaacatcaacatctttttgatccggataggtgatccggcgatggtggcatactgggttagcaatgaaagttaattcacgtttaccgtcgccataagatagctcatagaagcccctggtttcgtcctcatcgttcgcactcatggtaagaggtgtaccgatatagaaaacgttagcgccttcgttagcgtgatgatagtggcctgaatacacgatatcatatttctttaagaaatcaggttcaagcccatgatccgctttactgttcttatagaaatagtatccggacagttcaaagtgtcctaagcagtattgagattttgactttttgatgaaatcaaaaatctgttgtgtgttttcttgacaaatccacgggatcaaatcgattgattgcagcggagaagtatcaagatttactgtcatcggttcatcaacaaccgtgaagcaatcatactgatcaagaatctctcgcggtgagttagggcggatcttgtctttaaactggcaatcgtggttcccaaccagaacatagatatgtaatccggcttcttccagtagtggcacaatacgttcacgaatgaatttcatcgtggtttgtgtggtggccttgcgcacatcaaagaaatcaccagcatggaaagcctcggtaatgccgtttgctttgcagtgttctacgatttgtacgaatacattgtataggttttcttcattccaggggttgtcctgacgcaagccagcgtgagtatccccgatcattaagtactttctcataagaccctcatagcccctttcggggctacttgtttgttattgcttctgttgtgaagctacgatatttcgaattgatgctagtgaagtgttccacatcgtatcaatgaaatcctctgtatacggctgtttgagcatatcacgaagtttcttaaccgcatacacatactgaactttattacccctgaatagggcttcctctgcgtgtctacggaggcgtttgatctcagtccggttcttcttaatgaatttttgtgctcgcttcaatgcgtcggcttctacacgttcctggatcttttgttgaatttcctcttctggatccacttcttccacactggttagtacttctttctcttcatcaatcataagtgatctccatgatcatagtttcggcgtttatcatataagacaaaaccccttcttctacttcgaaatcggggtttcttacgtcagttggatcgatgataaccgggattcccacgttttgcaactctaattttacgaagtagggtagcaagtcaatttcgtaatcgatatcagttaatattttgtttaagtcaattattgctttcatagaaaatcttccaatgttgggaatacttccgcttccttgtctttggttttggtggcggaagcctcgtactgagatagtttgtcatgtagatcttgaatgaaaccttcgtctgcaatactaaccatatccgaatcttcgcagtcgtaaacgtgctcaaggaagaatttatatttcttcgcgttctcttttttctcgtacagaatacgtgttacgaatgcttgccaacatgctttgttaatgtaaccgtaaacgttggtataacgagtttcatcgaagttatgcagtcctgagattgcagcggaaattccgtcatcaatcatatccattttccaatcttcggaataacggttgaagttgtaacgacgtgatagcccgtttgcaatatccataatagcagcacctaactcattaggcattttgcgatcacctgtttcggcgatttgctttttccatgcacagaggatagggtataatttttcattgtctgcgtagatattggttgtttctttagtcatagtattcatatttcctctttgaagttaagaatattatataataactgtagacaaaatcaaatttcattctatattatttaaggttaaagtagatctaatgatctatagatcagatctaaattatataaaatttattgattttagtacttgacctacaatgatcattgtagtaaaataattattaattaataaattatagatcataaatttgatcagatcaagtattattgatcaaaatttttatggtcttttgtattgacttcatttcgtaagttactacaataaccccgttctttgaaaaattgaggtatgtatgagcagttttgcaagcatgtttaacttgaacaagctgatgcaagatgaaggggaacccgatgatactatgatcatcgatatctctaacatttccatcgctacactgatgaacaacttcaaaccaaaggaacaagcatccatcacgatcgaaatgattcgtcatctggtgcttgacactttacggtttaacgttgtaaaatttaaaggtgagtatccagaaatcgtgattgccttcgatgacagaaattactggcgtaggcaaaaagcctggtactacaaaaaacgtcgtcagatcgaacacgaagaatcagaatgggattgggatcgtctgaacaacttcctgaatcctgtgttcgaagaaatccgtcagaatatgccttatctcggattaaaggttgaattcgcggaagctgatgatataattgctgttgttacgaaaaaagctgttggtgaaggtagacgagtattagtggtttctgctgatagcgactttacacaactacagaaatataacggtgttcgtcaatggtcgcctccccagaaaaaatgggtaacgcctaagtacggttcgccacgtaacgatctgcgatacaaaaatatcaaaggcgataaaaaagatagtatcgcttgcattaaaattagaaatgattatattgtgacgaaggttgaaggtgaacgcgccccagcggtaaaatcctctgagttagaggcatggctggaggcagacgatccgacaacattgatgacccctgaatgggccgcacgttacaaagaaaatgaggaactacgcgatttcgaatttataccaaaagatattgaaaattcgattattgaagcgtataatactccaaaatccggaagtaaagccaaaatggaacgttacttcatggataacaaactttcccgtatgttcgaaaaactgagtgatttttgaggtaacaaaatgagtgtagaatttttacaaacaaaccctgatgtagcaaaacaggtaaaagaactgatcaaagaagcatccaacgtgaaaactcaagttgagatcttcaacggcacgttcaaggatatcaaatccaaagcaaaaactgatttcggtatcgatggaaaaaccttcgggaaactgttcaaactgtatcacgaacaggcccgtaccgctttcgaagaagaaaacaacgaactgatcgaactgtatgatatgatcgataaggcgtaaagcatgatcggaaataagaccgaagtcggtttgtatatcgaaaatctggttgcctctgagggggcaacctacatggaagcaacgctacaatggatggatgaaaattctattgattatgcgatgctgaataaaacggttcctcgcgcgatccttgataagattagcgacgaagcgatcaaaggaaacatgcttcgcccatcggttgcgcttgaacatagttcatcaaccactctggacggcttcatgtgagattcaaagctccgtttgctgatagcgaggcgaattcacggcttgtgcctttgtctgtatacaagttatatctggcgatgaaaactcatttccaggggcgttttgatgtccttcaatacaactggcagatcaaagttagtgaaaacgcctttaacaagcgaaaggatagatatttctttgtaaaattagctcaacgctttacattcaaagaaatctattttatattcctctccaacttcgtagccaatccggatttctgggtaggcgatgttgatgaagatagtattgtcttttacaggcagtacataggaaagttacaaagactagataacgtgtttgtggatgacgttaaaaacgtgtacgaattcgccaaaatgaaagagatccccgtgtctctggtgttcaagtacagcgaaaaatcatcaacgtcctacataagcaaacttgtcctgtcaaatgtgatatcttacgaatcgtttttgatttttgactcatttttaggtatcataaataaacacgatcaagtagctgatgatattatttggtctgactttagcattaagttaaaggcatacagaaaaatatttgaccttactgaaaaagatatcataaaatatcgaaacttaatgaaacaaacgttaatcaaactaaactaaacgagaaaacagaatatgagcagcatttttaaacgtcaagatcccgctaaactccaggcacaggtagcaaatctgaaaggtggttccggcttccagaaagatgagaaagaatggaaactgaccctggacgcacagaaaaacggttccgccgttattcgattcctcccagcacgttccgatgatgaactggcgttcgtccgtatcgtgagccactctttcaagaaaaacaaccagtggtacattgagaactgttcctctacccacggtgattatgacggctgtcctgcatgtaagtacatttccgaaaacgacctgtatgaaaaggctaaagccaacaaaaacgggccagaagataaactactgagtcagatcggtcgtaaacaaagtttctgggctaacgtcctgatcgttaaagacccaggcgctccagaaaacgaaggtaaggtgttcaaataccgcttcggtaagaaaatcatggacaagattaccgccgcaattaacggtaatccggaacttgatgaaccgggtattgctgtaacctgtccgtttgatggtgctaacttcaccctgaaagcgaaaaaagttggtgattggcctaactatgacgatagctcgtttggtgttccggctaagatcaaaaacatcgacgatgaagaagttcagaaagcaattttcgaaggtatgagcgatctccgcccgatcactgccgaaagcgaattcaaaccgctggctgacctgactactcgcttcaataaagttatgggtagttcgattggttctgctggttccagcgcttccgctgaccttgatagcgaactgagcaacttcgataacgaaatggctaagtttgacaatcagacatctgatgtaaaatcatctggtggtgttgcatcggttccggtaggcgaagatgacggcgtaccgttcgacctggatgattctgatagctccggtgatgacgacctggataaactgttagacatgtaatacaagcgggggcttcggcccccactcaaagaattctaagttagagaagaaatatatgaatgaaagtaatgtttttgttgactacatgaaccgcgtccgtaaatcctgggttgctaaactctcggacgaaacaaaagaactgtttaaagctatgcctcaagaggaacgttttaaacactatcgtgacattgatgaaaaagtggttgcggaacatcgtaaacttaccagcgaacgccgcgaagatcctaagcgtacaaccgttaaagaaatggctgatatgcttgacacagcagcggaaaccgttgtaaaatcacttattaagtaacacttattgaaaactaaaggctgaatatgaaattctctaaacaaactattgatatcctgaaaaacttttctcaaatcaactcttcgatcatgctgaccaaaggttcattcatcatgacgaaatcaatcaacagcgttgtatacgcagaagctgaaattgctgatgtgattgatgaagatgttggtatctacgatctcaactcattcctgaacatgctgaacatcgtcggcactgacgctgaaatcactcatgatatttccactggtgaaatcgtgattcgcggcgacaagatgaagatcatcgaacgttcagcagacgcaacaacgatcccgaaaccgaaaaaacgtctggtgatgccagtagcagatctgattttccagattaccgctaacgatttcgaaaaactgatcaaagcgtctcgcatgatgaaactgaccgacctgtccgttgaaccgattgatggtaaactggtcatcaccgcgaaaagcaaagaaagtcaatcaactttctccgttgaagtcggtgagtatgaaggcgacaatgttttcaatttcgatatgaagattgataacatgcagttcatcaacagcgattacaaagtagagatttcctccaaaggggctgcaaaattctcttctgataacggcgttgcttacgtcgttgtacttgaagcaagtagcacattcaagtaagatagttttaaggggctacggcccctttcttttacaccatttattttgaaggtatattatggaacttagtgaaaatattgaaatcatcgaaaccaaatacggtaaaatctcccgatctcctgatgaatttgcatgggatcagcgctatcgcccaacaacgattgaagagtgtattttaccttctggtgacaaagccgctatgcggggcataatcaaatctgggcgtgttgagaacatgacccttgtatctgattcccctggcactggtaaaacgaccctcgcgcttgtgttggcccgtgaggttgatgctgaggtgttctttgtcaacggttcgaactgtggtgtaaacttcattcgtaatgaactggatcgttttgcttcatcaatgacgcagaaaccaggcggaaagattatcatcattgatgaattcgatcgttctggtatggcggaagcacagaaacacttgcgtagctttatcgaagcatacagtaaaaacgtttctgttattgtaacagcgaacaacattaacggtgtgcatagtgctctgctttctcgttgtcctcctgttaaattcggtgttccgtctgatgctgaacgtatcgaactgatgaaacagttaatcaagcgttgtttcggtatccttgaaatcgagaatatcaagtatgatcctaaagtcattgcagcgtttgttaaagagcattatccggatgcgcgttctattatcaaagcgatcgggttctactcgaaacgtggtgaaattgatgcggggatcctaaatgagatcgttggttctgatgtgtctcatatcattaccctgttgaaagaaaagaactataaagggttgcgctctgaggttattaaatatgcgtcagaatacgatacctttatcggaaaattgactgatacgatttaccctatcgtgaatcaggattcgaaaatcgcactgatccagattgtaggcgaaaacaacgcgcaatacgggctggcgatgaataaagaaattcatctgcaatatctgttgatgaacctgatgctttctatggtctgggaggcgtaatcatgagcctggcggaatttctggatgaagaagagttatccccgcatgaatccgcttggctttctaaagattgggataaggttgaagaactggtcaaagagtacggcaaggataaagaaaacaccttgtttaacatcatagacgaaatcaacaacggcaaaacgccgttggttatcgatgaagtgtatgataagtactttgtagacaacgcaatgagccagcacatagacacgatatacaacgcgtatgtgatgaatctggtaggcggtagtatctctgaccaaatgcactataactattatctcaactctgttaggaaggctaaacgcttcggtgcatgggctaaactatcggaagattttgaagagaaaattattatcgaaatccttcgcgaaaaatacagtgtaaatacacgtacagcgatggaatatttgcaggaacttaaagacctcggaatgttcgaggattggaaaagaaaacacgcaaaggtcgctctgtctttgttgggtattgtgaaaaacaaagctgaacaaaagaaattggaaaaattgattaaacaatggtgatgtatgttagaaattcaactaatcagcgacgattcttttttaaagatccgtgaaacgctaacccgtattggtattgcaaacaacaaaaagaaaatgctctggcaatcgtgccacattctgaaaaagcaaggtaagtattttatcgtgcattttaaagaactgttgaaactcgatggtcgtcaagtcgatatgacggaagaagacgaactacgccggaacaacattgcgcgacttctcgaagagtggggcatggttaagatcgtaacccctgggttgaagtttgcagaagaaaacaacttccgcgtactgactcactcgcaaaaagcagattggatcctcaagtacaagtaccggatcggtcactaatcaaaaagcccttgcattcgtgcaggggctttgttatattgggtgtacaccattgagagggatatattatgactattaacgaaatcatggattcaatcaaatccaacgaaactttgatcatcccgattgtaaaagatgacatcttgttatcgttaacttgcaatctgtcagatacccgcacttacagctatgcacaacattactttcctggattttacgatcgtaacatttcagagtacacgttgttatgcaatcaagttgaaaccactcatttctatgagcgtattaaaaaatctctggacttgatccaacaagcaaaagaagtctttatgaaaagaatggaggtcgcgcaatgatccgcacttacatgaataaaattttcgcggcccgtatggataacgttattgatcaacgtgcttatgatgatctggtttcccttgcaacctgtcaactggatgaacatacagtaacggaaaggaaactactggttaacaaagctatcatgatggttaatcagggcattgcagaagcaaaatatcatagtatcaattccagtatttttagcatgttattcgacgggtttaaacttgaacgccagcttgttcaactgagaaagatccgtgacttgttagcagaagggttgttggttttagaacatcgagtaaacttgaatttgctgtaggtggtgttacaatggaacattatattaatggagaagacaagatccaatgaatgaattttacctatcagttgaacaaatgggagataccatttacgagcgcttcgttgactctaacggcaccgaacaggtacgtaagacgaaatatgcgcccgtaatgtatcaacacgctatgaatggcgtagaaaccccatacaaagacatttacggcaagccttgcctcaaaaaacagtttgacagcatcaaagaagctaaaaactggatgcagcgtatgcgcgatgttgggatggaagcgctaggtatggacgattatcgactggcttacatttctgacatgtaccggaatgaaatcgaatacaaccgcgaacacattcgcattgcttctatcgatatcgaggtgaccgccccagaatttccggatccgcgtgaagcaaaatatccaatcgatgcgattacccattacgatagcattgaagataaattctatgtatacgatctggttgagggtggccttgcggaatggtgcgcggaaaacgttgatcgcaaagacattagcgaagaagatttaaacaaaattgtttatcggtctttccagaccgagaagtcgttattgtctgcgtatatcaaagattggaaagagcgaacccctgttattgtaacaggatggaactctgacaaattcgatattgcatatatcatcacgcgatacctgaacattttcggtcaaaacgtggtaaggcattttagcccatttggtaaagtaaccgccagaaccactactgacgcttacggcaacgaacaattaggatatgatattttcggcgttgctcaaatggatggtatggcgctgtataagaaattcagctttaccccgcaaccgtcttaccgtctggacgcgatcgcggaatacgaaactggtaaaaataaagttgagtatgaaggttccctgtctgaactacgccagcgcgatcaccaactgtacatcacgtacaacattgttgacgttatccgcgtacttgatatcgacggtaaacgaaactttattgaactggttctgtctgtagcgtactatgcaaaaattaacttcccaggggttatgtctccgctgaaaacgtgggacgcgatcatttataactctctgcgtgaagataaggttgttattccggaaaacagacgccatactaaaaccccttaccctggggcatttgtgaaggatccagttcctgggccttacaaatacatggtatcgtttgacttaacaagcctgtacccttccatcatccgacaggtgaatataagccctgaaacgattatgggaagttttgcggtacgtgctcttgaagagtatattaataagaccgcgccgcgccctagcgatgaatttagctgttctcctaacgggtggatgttccgccgtgatatcaaaggcgtgatcccagtagagatcaagaaagtatttgatcagcgtaagatgtggaaaaaaagaatgatggcgggtgagcgaaatcttgaactcatcaagcacgaactcgaacacttaacagacgcgcataaccaaatgattgatcctgactttgatttctatacagatttcagtgatgaatcgaaagcagttctgaaaactcttacaaaacaaatgcttaaagcagttaagcgcgtatgtgagaagaagatcgcacaagcgaacacagcacagcttaaccgtaagatttctatcaactccctttatggtgcgttgggtaacgaacacttccgatacttcgatctacgaaacgccagcgcgatcaccatgttcgggcagttggctatccagtggattgaacgtaaggtaaacgaatatcttaacgacctgtgcggtactacggatcatgcatatgttcgatactgtgatactgactccatttatgtttgtatggataacgtgattgcaaaagttggtggtgaggctaaatttaaggataataaccattgggttgacttcctggatcgctttgctaaagaaagaatggaaccaatgatcgataaagggtatcgtgaactttgcgaatacatgaacaacgtggaacacctgatgtttatggatcgtgaaatcatttctgggcctccgttgggttccgaagggttgggaagtttctggactgctaaaaaacgatatgcggctaacgtgtgggactccgaaggaactcgctatgaaaaaccgaaattgaaaatcatgggtatggaaacacagcgttcgagtactccgacctctgtgaaagtattcctgaaagaagcgatccgccgtatcctgcaagaaggtgaattatctttacacgaacattataaaaagttcgaagaagaatataaggaacttgactacagggaaattgctggtgtatcatctgccaacaacatttcgaaatatcgtgatggggctggatatccaataaaaggaacaccaaaccatattaaaggggtgctgttctttaaccgtttcactgctgatattgatggtgttacgccaatcatggaaggtgaaaaggtaatggttctaccactaagggataaaaacccgtggcaagccgattgcatcgcgtggcaatccggaaataaactaccgtcagagatcgaaagtgatattctggcatgggtagattatccgggtatgtttgaaaaacatgttattagtccattgactaatatcacggaagtatgtaaaattgattatgaaaaacgtgccagtttaaacgatctgttcggtgactggtaaactctaggggcttcggcccctttcattaactagtgagatatatagaatgagaatgaataaatcggaaaaattaaatgtcaaacaaagcactactaaaaaaactgatcaaaaactcgaatagccaaactgcatctgtactttctgaaagcgacgtattcaacaatattaccatcacgcgaacccgtgtgccgattctgaatctggcgttgtccggtgcgtttaacggtggcctaacttctggtcttacccttttcgctggcccgtccaaacacttcaaatccaacttaggtttgctgactgtagcggcttatctcaaaacgtatgaagatgctgtgtgcctgttctacgattcagaaaaaggtgttactaaatcctatctgaaatcaatgggtgttgatccggatcgtgttgtgtatactcgtatcacgacggtcgagcagttgcgtaatgacgttgtaagccagcttaacgcgcttgaacgcggtgataaggtgattgtattcgttgactcagtaggcaacacggcaagtaaaaaagaacttgctgacgcgctgtctgataacgataaacaggatatgacgcgagcaaaagcattaaaaggtatgttccgtatggttacgccttatctggctgacctggatatcccgatggtttgtatctgtcatacctatgacacacaagaaatgtacagcaagaaagttatttccggtggtactggtttaatgtattccgctgatactgcgatcatcctgggtaaacaacaggtgaaagaaggtactgaggtagtgggttatgatttcatcatgaacatcgaaaaatctcgattcgtgaaagagaaatcaaaattcccgctgcatgttacctatgaaggcggtattagtatgtattctggccttctggatctggcaatggaaatgaactttgtacagaccgtaactaaaggctggcgcaaccgtgctttcctgaataccgagactggcgaactcgaagttgaagaaaagaaatggcgtgagtcagaaacaaatagcgttgaattctggcgtcctctgtttactcatcaaccattcttgaaagctatcgaagaaaagtataagatccctgatcgtgaaatcagtgatggttccgcgctggaagatttatacagcactgatagcatcccagatcctgatctggatgatgacgatatcccagaatcatttgatgatatcgaagaagacaacgaaattttataaaatatggggcttcggccccataaccgaggcaatgtatggatatcgagagcaaagcaaagaattatattgatgaagcgatgaaagatgttattcaggaacttctgattaacgatgaaaaaggtgttgcgcatctggtttatattcataaggtgttttgggatcatggtctgaaagtagaattcagtaccccagacgaagacaaagaagcattgatcccgctggtgcatgatgcaatttatgcacagattaaagagcttgaaaagggttcagttgtcccaaagcctaaactgacattatgggatgtattcaaacaaaaggtttacaactttttcatgatgttcagcaacctggtataaggcaatacaatgatcgttgatacaatattttctaacctgatttataacgggacatattttgtccaagcatggcctcatctgaaaaaggaatatttcgaaggcaatgcacaagttttgtttgacctcattgataaacatgtacaggaattcaacggcattccgtcaaaaactgctttagaggttgcgcttgacaaacgaaatctaagtgatgtagtctacgaagacacgaaaaaggcgattcagtcgctgaaaaatgcgccagaagatttagattggctaatgaaggaaacggaaacatattgcaaagacaaagcaatgtatcgtgctctttctcgcgcaatcgagatccaggctaacgcagaaaaaccactggcagaacagaacaagaaacttcctggtgttggggctatccctgaaatcatggaggaagcattagcaatttcattcgatagttcagtaggtcatgactatttcgaagattatgaaaaacggtggatgctttaccaatcgaaggcgatgaaaattccgtttggtatcccgatcctgaacgcaatcaccaaaggcggcgcggaacgtggtacactgaatatcatcatggctggtgttaacgttggtaaatcactgggcttatgttctcttgcggctgattatctgcaacagggtaaaaacgttctttacatttctatggaaatggcagagcatgtttgctctaagcgtatcgatgctaaccttcttgatgtgactatggatgacatcgacgaagggaacattacatacgcagactataagaacaaaatggagcgccttaaagcgggtaaggttgggcgtttggtggtcaagcagtaccctacatcgggtgcgggtgcaaaccactttagagcgcttgtgaaagagcttaaattgaagaaacagtttgtgccggatgtgatcattgtcgattacctggggatctgtacttcaacccgcgttaaaggtgctgaaaatacctatattctggttaaagcaattgccgaagaactacgcggtcttgctgttgaaactaataccgtaatgtggacaggcgcacaggttgggcgttctgcatgggatagttcggatgtgagtatgggtgatgttgcggaatccgctggtttacctgctacggctgattttatgttagctgtaatcgagacggaagagttagctgatcagggtatgcaactgttcaagcaaatcaaatcccgttatggcgataagaacactttcaacaagttcaagttggaagttcgaaaaggtaatcagcgctggatggataccgacaacagcgaatacgggtttaaatctgactaccacggcaacactatgcctaaaacagtagaacagacacaaggcccgatgattaaacaggctgaatctacccgacgtgaaaaaatggcacagattgcaaaatctgacattcaattttaattgacaggggcgaatagccccataaagaatgtaaggtaatgaaatgactaagactataacgattcctattccggctatcaaactgctgactggactaactctgatttttgcagccgctaaagtgtttggcttctcgcaaatgtcatggttctgggttctcttcccagttctcttacccgtctacattgtagtaggcgttgtgttggtgggtgctgcgatctatctgctgttctcactgcttgccagtgacaaggccgaagatatgtatcgctgggtaaaagccaaatacgaaaaacttttcaaaaaatcgtaaaaaggtattgacctgaatctccattgtggtaatataactcacgtagacaagatactgagttaaacaaaggagattcaaaatgaacgtattcaacaacccttacaacgaaatgctgaacccgaatgttgatttcagcgatggttattttgacgcaatcgtaaacagcatcaaaaacaaaggtttgctgttagcgatgctggaaaaaggcaaagatgacgttgaaggaagtgttgatttcctctggaacttcctccctatcgaacctggtttcaaagttggttgtaatgaggaacaagcgaaaaacgttcttcggtatctcatcaataacgcataaaaaaaattaagcccctttcggggcttttttgtatctataggtattgcattctttcaaaaaagatgataccttaatcataacaaaggaggacattatgaaaatcgcattcgttatcactttcttacttgcagcactcaacatcgtaactggtaattcttttagttggtgggtggtggcaatgccttacattttcgtgtatagcaaaatcatggtgattgctggtgtgaatcttgtccttgctatcttactatttgtattcgccgccctgaatggtgaagcaggttctacctggaaagccatgaaagagggtgttaaagagggtttgaaatgataaatttagatttttgtaaggccgaaatgcaagctgacgcagacgaagaagaaccgaagttcgatagtcctcacagttcgcgctggatcgtagctgttgacgatgaaggttatgttacggtattatctcgaccattcattcatgatgcattctttgaatgtggacgcagcgcggaagatatcgggcttcctgattctgtcgaaatgcctcctggtgtatatgaatggatctgtggttttgaacaaactactgactgggaaaccggatatgtggacgggtgggaattctacccaaatgaatcaacattattgtatagctgggaaaatggcaaagttaacgaaagcggaaaccaagaaacacaatcagataatggatctggttcactctgacaaagcgctaacttacgaagagaagttgttcattattgaaaactttcatgaaggcgcgtttacaaacaattctgaattaggggcgttctttacccctattggacttgctcgcgatttcacaatcgatgcttgcacaggtggaagtgttattgacctgtgtgctggtatcggtgggttatctttcgctatggttcattacatgatgtacaatacaccgcgtgaaatcgtctgtgttgagttaaatcacacatactatgagttaggtaagcgtatcgtaccagaagcctcctgggtgcatggagacgccttaacaactgaatttaatcaggcgtttgatatggcgatcagtaacccgccttttggtaaaatcaaaacctctgattttaagggtaagtatacaggggcagaatttgagtataaagtaatcgaacgtgcatcacagatcgcgcgtcagggaactttcataatccctcaaatgtctgcaaatttccggtattcgaaaacacactgtttccgacaagatgacagcaccacatcaagtaaatgcaaaaagtttcttgatgaaactggcctcgttatgaatcctggatgcggtatagatactgggtattacctggaggattggaaaggggttaaaccactatgcgaggttgtttgtatggagtttgaacctgaaaccaaatctgatttattcactttcacaatagagtaataatcatgagtgatcaattagttaaaaatatggatttaacatatagcgtccggatgatccggctactcaaaaagccctggactgaatggactgcttacaagctggggatccttgatggacaaggcgaagtaattcgcaaccccaaaacaaaagaagagttagaagcgtattctccttttcatcgttcagtacgccatatcaagcgtagaatgaatgctgttccgtatatgagtgggtttatgaacttaaccagttcatatgataccctacgcaatcgctacaatctgacagaacaagagcatgaagaaatcatgttgaacgttccacgcctcaaagaatattatgataaggggcgcatgttagaggatatggtcgcgggtgattctggcggcgatacagaaaagattgcttctggtgtgactactggagcagtaaccaacatcgggccgaaagtattaggcgttacccgtgcagggaaaaggaaaaagaaatgataattcctccgctgaatatcactatctgggctactgctaacgattatacatggtttccaatttgtatcatgtatatgagtgacaacgcgaccgtttatcagaatcgtcgaaaaggttctgataaaattgatattgcaataaattattcgtttaaacaggcatttcgtggttggaagttaatgcttgacggaacagaaaagcaagtaagttcttgacagaaaaatcctcttagtctatgatattgaaatcatttgattaggaggatttacaatggcggttggatttggccctgctgacggtgttcaagataccattcaggcaacaatagacaatgcgatagattttgcacgttctcaaatcagaaacggagaatcattaacgcattgttttgattgtggggatccgatacccgaaaaacgtagggctatcgtgaagggttgccgttattgtattgaatgccaaaaagaacatgacgaaatgatcagcgcggggtataatcgacgaggatctaaagatagtcaactgaggtaagaaatgtatcttgatatagaatttgcaacccgaatcatgggatcactgcctcaaagcgaaatcgttcgtaaatcgggggcattaagcatcaatgcgcgttgtcctatttgcggcgactcaatgaaagacaagtacaaaaaacgattttggatctacccttctaaaaagggtgatcatatgaattgtggttgttttaactgtggttatggtgtaccgtttagcgtattcctgaaagaatattatccagacgattaccgtgattatctcatggaatcgtttaaggatcgcaattcgttaaagccaacgcatacagaacaaccgaaggaagagaagaaatttattcctactcttcaattctgcgaaaggttagataccttgccggatgaacatccgatcataaaatatgtgcagaatcgttgtatcccccgtgacaagtgggatcggttgtggtttactcgcgaatggcaacaactggttaatactgtgaatccggatacctatccgattgcaaaaccagaaccgagattagtgatccctatcttcgataagaaaggtaaaattgaatctttccagggccgtgctttacgtgatggtgctaagtcgaaatatatcacaatcaaagcctgtgaggaatcaactaagatttacggacaggatacgatagatccgctaaaaacggtttatcttcttgaggggccattagatagcctgtttgttgataatgctggcgctatcactggtggacagcttgcactttctgaggttccgtataaaaatatgcgtgtctgggttcttgacaatgaagcacgtcatccggatactactcaccgcctctttaaattgattgaggctggagaaaaggttgtaatgtgggataaatgcccgtggccttccaaagatatcaacgaaatgataaaaacggacggcgcaactaaacttgaaattatgcagtatttgaaagataatactgtttctggactcacggcaaaacttcgatttaagtcgtgggacaaatcaccgaaaaaatgagattgatatgactactgataaaactcctgtatttaattcatgtgcgcacctggttaacccggaagatctggaatttgtagattccgaatatcaaaaggttctggcccgtaatggcgatcctttacaatccatgctggatttacaaaaccatgcacagcaaagcctgtctgataccctgcattgggttccgcgtccggataatctggaaacttgcggagaaatccttgattggctgaaactgcaagacgacgcgatcgccgacgaaacccgcgaattgtataccgctctgggtggaatgtctcgcggtgttaaacctgcatccggtgtttggaaaccgtggaaagcaaatcaccaggaattgcgcaatactaaatttgcggatctgagtgaagaggatcgtttagaagttctgtttgaacttatcgatcagtggcatttctttatgtgtaaattcctggcgctgggtatggatgcggaaaccatctacaaactgtatgcactgaaacaagccgaaaacctccgccgttgggctaacaactactaatggatccgatcatcgcgctagtagctgttggggttctttcttatggtgtttgcgcgatgatcacatatcttttcggttggtgtgtgtttcacgtaaatggcgttgaaagaaaacttttactgattatactatcagtgttttggtttgttggaatattctacgtttgttatgaggggcgagaatgattacaaaatattatatcgtcgttagtaaggataaagacgggtttaaaattcccttcattaaggaaggagagttaacacctttgttgtttctatctccggacgatgctaacgagtataaaaattcgattatcaaagaatataatgataagatgaatccagttaaacaaagtggtcttagccgattctttcgaaaggaagaagtggaaaccgtaaccgaaaagaaaaagaaagatatgcgttggtttattgaacacgcaagtattcaaggggtattgattaaagtatgagcgaattaacttttgacgatctgagcgaagaccagaaaaacgcacatgatcgagtgattaaaaatatcagaaacaaaatccatactactatcacaggtgggccgggtgttggtaaaactactctggtaaaatttgtgtttgaaacattgaaaaaactgggtattagtgggatctggttgacagcgccgacacaccaggctaaaaacgttctctctgaggcggtaggtatggatgcaacgaccattcactcagcactgaaaatcagccccgtaaccaacgaagagttacgagtatttgaacagcaaaaaggcaaaaaggccgctgatctgtctgaatgtcgtgtgtttgtggttgaagaagtatcgatggttgacaaagaactattccggataatcaagcgtactattccgagttgtgcggtgatcctgggattgggtgataaggatcagatccgtccggttaataccgaagggatcaccgagctttcaccgttctttgatgaggaaatttttgatgtcattcgcatggataagattatgcgtcaggcagaaggaaacccaatcatccaggtatcacgcgctatacgcgacggtaagccgttaatgcccctcatgaatggtgaactaggggtaatgaagcacgaaaacgctggtgacttcctgagacgttattttagccgtgttaagactccggatgacctgaacaataaccgtatgtttgcttacactaacgcaaacgtagacaagttaaatgcagtgatccgcaaacacttgtacaaaactgatcagccgttcattgttggtgaagtggttgtgatgcaagaaccgttagtgacagaaggccgtgtgaatggggtttcgtttgttgaagttatctataacaacaacgagcaaattaaaatccttgaaatcatcccgcgttctgatactatcaaagctgaccgatgcgatccggtacaaatcgattatttcttgatgaaaacagaatcgatgttcgaggatacgaaagcggatattcaggttatcgcggatccggttatgcaggaacgtttaggcgattatttgaactacgtcgcgtttcagtataaaaagatgaaacaggaaaccggatacaaagccccctggtattcgttctggcaaatcaaaaacaagttccagacggttaaggcgcttccggtttgtacgtatcacaaaggtcagggaagcacgtatgatcattcatacatgtatacgcgcgatgcatacgcatacgccgattatgaattgtgtaagcagttgctttatgtaggaactacccgcgcacgattcactgttgattatgtctaagggcttcggccctttgaggttattatgaaaattattgttaaagtcaaagatgtagaaaagattttgcgagaagttgaccgtattggtagagaggggcttgattatctcgaagggttcaattctatcgatatcaatttgttgtttgcaaaattgcgctgcattgtcaacgcaaacaaagaagttgggttatactgtcctaacgggccgacctacacgtggggaaacatttcacaagatatcgaattcacttttgaagagtatgcagtgatcattgatactttgaaaatgggtcgtaacattcgtgaaaacaaaaacatgcttgaggggttttaaatgaatattcaccttccgcgcctttatgctgaatccgttgccgatctgattttgaaaagtgatcgttctacaatggaagattaccacgattgggaacatctggacaattttgcagaggctgtagaaaacatgatccgactggaaaaatcgattgctcgttgtgggcttcgtcagttcgggatgatggcagtaactccagacatgatcaaatccgttgatgttactccggaagtcgcgctatcattggcctatttcatggaatcgtataagcggggtcgcgaatgagtcatttacccgtagattttgtatttgattatgaaagtattggcccgtttccaaaaggaaaactagctgaacttagctatgttccgtttgttgatgatccttatgatccgcctaccttccaggaactgattgctaaaggaagaaagtacaaatttgacatccggaaacaaccagaacgaatcaaagatgaaaaaacgatcgaatggtggaaacaacaatctaaagaagcacaaagggttttgttcccttccgatattgacatggatttgtacgaaggtcatcgacaattctttgctgatttagcggctgacggtgtgagtcgttggcagtcatacgattatactcgcggccctgaattcgaccgttctatgctaaccgatgttgtacgaactatgacagggaaacttgacacgtttgaagatatgccgaccgtgttctggaatagccgtgatgtgcgtacagctattgaaaaccgtttactgactcgcggagtgaccacgtgtccactacgtaaaggcatgttagatggattcattcagcatgattcgattcatgattgcgctaaagatgcattgatgttaatctatgctaaacgttatgccctggggctggaagaacctccatccttagaagagacagacgaaaacagcataggaaagaaacgatgatcacattaactattatggatcgccattactacgggaacacgattaacgaagcgaaagcaaaagcctttgatgatatcattaaccaggatctggttaagattgaatctgatcgctatgtcgtgcaaccaggtgatagcctatattctatagcaaagaaactgtatggtgttggtgaactttggcctgatatcgctaaaatcaaccgtgattctattccggatgcacgtctgatccatcctggtatagttcttcgattgccaaaactggtaaaaatttaaaacaaagcccttgacttcggttgagggcttttgttatattgggttctcagaaaggagattgatatgaattttactaaatttgaaatccggctgttgattacgctggctatttgcggagcggtatcattgattagtttgttaacgtatatcgctgtaagaacaacgatatggcttcatgactggtttactgtacttgacacaattaaggggtgatttatgcgtatagcgattattggggcggctttgggtgtaatcggcgaccgtttagtaaactgtatgatcgaagagttaaagtcatcaccctatccattttcgatggaatggaacaaccaatttcctaatttggttggggaagaacccacgatccataaagtcaaaccataccgaaatccggttgtgcctaaatcattgcaccgtcaatcagtaaacaggggtaaatgatgtcagaattcgcgttagctatccttgtcgtgattgctgtaatgggttcgatcctgttttgtcgcatgtatcagttagatgatacacaggaatggttggacattaacgaaaaacagtttcgtaagcactttgcaggtgaatttgtttttgtgaaatttcgtagtgactacaaggtcgagtttgagtttgacggaaaagggaacaactaccacataatcacttctgttattgatgcaaagaaaatctttgataagacacagggcggcgggatccgtaaattgctcaaagaaataaaatagcactttttgttaaagaagcctcttgcattgcgggaggctttttggtatcttgtattcatcgaaacgaaacagagaaaggaatacgaaaatggttaaagtaaaatatgcagcacacgttaaagcaggtgagattgttggtttaactttcggtgctgaaattggttctcagtgggcgctggttgaaaaggtagaagacctgggcgataaagtagcaatcactgtgaaaatgcaaaaacgttttactaaccgtcctgtaatcactaagaaagtgaagaaggaaaaacgtgttaatactcagactttcgaagaattcatgaactggtgcaaaatgtataaactggatacctactaatagcactttttgttaaaacattctggggtagctttggtatagttaccccatcgaaacaagggaggaaattattatgatggttaacggttctctttatcaacaagcagttgcacaatggaaacagaaagttcaggatgcagaacgcgggatcgcttattgtgatgaagcgttggcaagcaatcttgaaaactgggaacgcaaagagtacgagaaagttaagcaacgccatttgaacgaactccctgcattaaaagaacacttaaaatatttgatggataacgaaaaaagccttgcatagaataaccatctttgatatagtacttacatcgaaacgaaacacactttaggagatataccatgaacactttcgaaatcctcgcagaaaaagcagcacctttcatggaagcaatgcacaaagcgcgtaacgctcgtttccaagattctcctttcgaaaccgttttcgttctggagaaaggccgcaaatatcatcgtgttgttcaggatactcgcaacaaagaaacaggcgaaatgttcaatcagcgttctgttgccgccttcatcgataatgatggtaatatcctgaaacctgcaagctggaaagcaccagcaaaaggcattcgtggtaatatcttcaatgacgcagaccgcgcgattgaccaaagcggttatgtggtttatcttcgttaacaaaagggcttcggccctttttcttaaaaggaatatagcatgagtaacaaaaacgaagacgctaaaatctggaaagctgtaggggttatggctgtaatcgctgttgtgggttactatgcgtataattcctggcaagaaacgattgatgcgcaagtacaggaacaacaaaaagccgacgcaatcgaacagcataaccagcttatgcaattgcgctcgctgggatacaccacgaaggaagattttaaaaattcctttggtgactataccggatccctttataccgcgtggggaatgactgacggcgattacatgtacattgaaacagatcgttataatgtcccacaaagtgtatgtttctatagtacgccgagagacaacggcaaaatcacgtcatatgcaccagaattcaaaacgatttctgttgatatgaagattgacgggggagaaaccctatcatttgccgctaaaggaaacaacggatccgagcggttgtgtcttctttctcctactcgtttcttacgcaacattcaagacgcgagtaatttaaaaattgctttaccatacatcaaccattatgatattgttgatgaagtaaaagaatggaacgtatcgcaaatcggggtgaaattcaaatgagaaaagcacgtaaaactaatgcagtgttgatgattaacggtgaagtaggaaaaccttgcaccaattctaaattcatgcacattgcagggcttccgggcatgacgcttaaaacgtcgtatgatacccattacaacgaagaaactacttcggtatacatgggagaagatctaatggctgaacgcatcatgcaatgcattcacttccctggtgaacgtccttcaattgattgttatatttttggctaccataaaggtattgtaaatgaatctgtataaagaaaatgatctctatgtttctgcatttggcctactcacgtatcacagtatgtcggctggatacgggaaagagttcgattttgtagcaagcgttaaacgacatttggaacgcagcggtgggttgtctattccgcgccaaatccattatgtttgtaaagaaggggtgtttttgaatggtgttcctcatgtgatccctttcaacgtgtttgaaaactattttacaaaatacgttgttcaacaaacggagacgacatccgagaatactgcaacgcgagaagaaacggcgatcgtacttgataagttttttgaaatcgctcataaagtgaagaaacgcacgaagagtgatgtggttcatcacctatcagcggaagttggcgagatcagcgaatgtctcattcagcctcaacgcggcggtaatatcgttgaagaaagtattgatgcgattgtgtgcgcacttgatgtgatttacctggaactgggtactactcacggacggtacgaaattgcaaaaattatcaacgaaatgcttgcagaaaaattagataagtggtatcgtacttgtaaaccttgagtttacttgtgaggattatatcatgttcgtatatcgtgtggaattttcttgttctttctggaatgattgtacagaaaaatggcaaacaaaaagcggcccatatgtcaatcgttatgtgtcaatggataccgctgaatggctggatcaattctgtatgaatcctgatatctatattgatatggatgataaccgacatccagcaccggatgacgataatcgattgatgcgcaaccttgaaaaagataatatagactttcaagaggctgggttatactttggttttcagtcaatacagcgcctttctcgttggttcaatgcatatgaacgcgagtacatgcacaatgttggtttcgtctgcatggtatacgaagttgaaaacttgtatccgggcgcacgtcaatgtgtttttgacatagacaaagcccgtttagttaagatgttgagtttaaaagagatttattaatgcctacctatacctataaatgcaccaagtgtaataaagaatttccaaaaatggcaagcatcgcaagccgcgacgaaccgaaagagtgtgattgcggaggcgaagcaaaacgaacggttgataaacctcaaatggttcgtgatggtttcccttataacaagtaaaccccgaaaggggttttctttttcatagaaccctatataatgtcagtgattaaacaaagaggtgaatatgagtttagattttcttctggcagatgatgaaccagaacagaaaccacaaccagccaaaaaaggcgcaaaggttgacgaatcattttgtatgagcgatcgcgatcatattcggttgcgtccaaatatgtacgtcggatcggttaacaaagaagcgcatgaacgtttcataatgggccaatatcgcaaggttgagtacgtggaagggttggttaaaatcatcaacgaaatccttgataactcgattgatgaagcgatccgaactgaattcaaacatgctaataagattgatgtaaccattgatcataatctggttaaaatctctgataacgggcgcggtattccccaggatgatgtaaaaaccccagatgggaaaatagttcctaaaccagttgcggcatggactatggcaaaatcgggttctaacttcgatgataaaaaccgcgtaacgttgggtatgaatggtgttggttctttcctgacaaactgttatagctcgatttttattggcgagactgcaaacgggaaacgcaaagtaaccattaactgtacggacggcgcacagaacatcgattaccgaaccagccccagtaaagaacagggtactactgttaagtttactccagacttctctatgtttggtgtaactggtatcgatgaagaaaccaaagaagtgattaaggatcgcttaatggcccttgccgttgctttcccgtctgtgaaattcacatataacggcgaaacgctctctaatcgcttcccgctgtacgcttccatgtatggggataaaaccattgtccatacaaataatcgcctcagcttcattctggcgagcactgaggacgggtttaaacagaaatcctttgttaacggtctggatacgaaaaacggcggtgttcatgttgagtgtatgattgatggtatctattctgaacttgaaccgatgatcaagaaaaagcatagtatcgagatcccgaaagcacgtgtaaaagaatgcttaactcttgtggtattcctgcataactttaatgcacctgcattcgatagccaaacaaaagagcgattagcaaatacagcaggtgagtttaacaatcatgcgaatttgaactacaaaaagatcgcaaaaatgattatggataccccagaaatcattactccgatcattgaatccgcattgattcgtaaacaagcagcagaagccgccgcgatcaccaaagcgaaaaagaaagcgaaaaaggcaaaaattgctaaacacgttccggcttccggtattgatacccctggggtagaaacaacattgtttctgacagaaggcgattccgctgttggtcagttcatcgaatgccgtaatgaagaaacacaaggcgctttcccgctacgtggtaagcctctgaatacatggggtatgagttttacagacattatcaaaaacaaagaactgtttgagctaatggctatcctcaatattcatcctggtgatacttccggaatgacttatgataatatcggtatcatggtcgatgctgacgttgacggcggcgacattttaactctgttgcttgcattctttagccgttggccttctttgttcactgagaaacggatccgatatattcgaaccccgatcgttatcgctaaagttgggcgcgaggaaaaatggttctattctcttgatgagtttgcaccgttccgcgataaagcaaaagatgtacgatatatcaaggggctgggttctttacgcaaagaagattacgaccgtgttctgggtgatcagttgaagtatgatgtcattgtacttgacgacgaatacaaagaagtgttagaactatgcttcggcgacgaatctgatccgcgtaaagattgggttaatggaaaacacaaattttctaaggttgactaatggaaagaagtattaaagatgttgtacaggtggaagggctaacgtttgccctttacacgatttattcacgtgcgatcccgcacctggtagacgggtttaaacccgttcaccgtttctttattcactctgctatgcagggcggaacgggatttcagaaagtagcttctatcgctggcggtgttgctatgtatggatatcaccacggggaaacctctgtagaagaagcgttatcccttatggcggcgcactggtgcaataacattccgttattcgaccgtgatgggttctttggttcccgtttggttaagaaacctggcgcacctcgttacatcaagtgtaaactatcgccaatattcaaagcaatttatatggatggtgatttaacgccagttcatgaagatccggaacatgtaccgccagcgtactatctcccgatcattccgatggtactggttaacgggtttagcgggattgcaaaagcatatgcaacaaacattccgcctcatgatcctaaatcggttgttaacgggtgcattgcatatctgaatgataaagatttcacactggatctgaaatacccttactttaaaggtgaaatcacagacggtacaatttacggcacgtatgaattgcaaggtaaaaccaaattggtgatcaccgagatcccagtgaaatatgaccgtgtgaaatacattgcaatccttgacaagctggaagaaaaaggcgttatcgttagctacaaggatctatcgaaagaagattttcggtatgaagtaacgctcaagcgagagtatgccaacgggttaacccgcgaaaagatcctgaaagatttcgggttgattgaaaattcaaacccaaacattaacgttatctttgagggtaaattatactcatatgaacgccctgaaacgcttctaaaggatttcgttgatattcgtatgaatgtatatcaacagcgtatcaataagcgtattcaggaaactaaggaagcgttagataaagcactggcaaaggttgcgtttattgctcaaatggtagaatctcctgattctctgcgtggccttagtcgcagcgaagcggttaaattcgtgtctacgtggataggttgcgagaatcatgccgaaatgttagtggctatgaacatctaccatctaaccacggacgaaagcaaaaagctggaagacgaagccgaagaattgcgtaaacagttgaaatactgggaagaaacaacccctaaaattgagtatctcaatgatttaaaagaactttctaagaagttgaaataattacaaagcctcttgcaatgcagggggctttttgctatattggttttgtaccaagcaaaggagattctaaaatgttgaaaactcgtagtgcaatggaagtaacccactgggcgcgtaccatgatggaaaaacacggtttgatcagtaatggttggacattccggatcaatggacgcattacaaaaactctgggccgttgcagttataccaaaaaactgatcgaactatctggtcgtcatgttgcggaagatatctacgaggatattttagacactcttttacacgaaatcgctcatgctcttgtcgggcgcggttatgaacatggtaaagtgtggcaagctatggccttgcgcctgggtgctaaaccttcaccgagtaaaacaactacaaaggatgctaatctggttgataagaatgagatcctttactgtttgttcatgaaagattatcaaggccgtgaagtctatcaggctaaagctgataagaagttttacaacgatgtgatgaacggtgttaaggatatgaaaaacatttggatcagtgggcgcaaggcatacacaaaaggccgtctgtatatccgtccagtaacccatgaagaacttgcatatattcgcaaagaggggtaaggtatgacacgttgtaatgcgcctaagttgggaaaatatctgaccatattcggattttgtgcgttcttttctatcattatcggggctatcgtgtggggtatacttgatatgaagaaacagcaggtcgaggaagaaaaattggtaaaattccttgacacttattgcgaagtagtagaatatggcctgaacaaaaagccaacgaagtactcttgtgaccaagttatttttaatgttaagtgagaaataaacaatgaaattacgcgaagatacaccgcaaacaatctaccgagttggtacagataccagcaagggacgaaacaaactatctctacgcgcaaacaagaaagcgtataagatcctttcttcgacagtatacaaatacaagatccgcgcaatcattcgcgaactgtcttgtaatgcgatcgatggacacaaagaagcgggaaatcagaacccgtttgatgtccagttgccaactgctgttgatcctcgttttgttattcgtgactacgggatcggtatgtctcctgatttcgttagtgatgcgtttaccgtttacttcgaatcaaccaaaaatgattcaaacgacctgatcggttctatgggtctgggttgcaaatctccgctttgctatgccgatgcgttcacagttgaatctgtaaaagacggtatcaaatgcggttacacaatctatatggatgatggggaaccgttctgcgatcctctgtatgagattgaaagcgatgaacctaacggggttactatcactgttccggttaaggttgaagatatcaaagaatgggaaaacgaagcagcaagggtatacgaatcatttactgatattcgtcctaactttgttggtgcttctattctcaaaatcaactatcagccgaaagaagcaaccaacgatagcggggtgatccgtcataaatcagcatacactagcggtgtatatgctcgcatgggtaacatcatttatcctctggataaagatttgtatgatacctcgatgttctattgctatacagaaagccagtatacgtatattattgacttcccgatcggtgaacttgatttcatgccttctcgcgaagagttgagtatggataaaatgacagtagggattattaaagaacgtctgaaacaaatcagccgggtgtatttcaatcgagttaaatcagaattcgataagttacaaaccgttcgtgataaactgacgtggttccattctctgccttcaatggtacaaaactttgttggtaaagatgctaattttcgcatcaacggtgattctattggctggatccatagcgaactagtcaaacccaacaaatataatgatgattatattgctgggtattgggcgaacgaatacgacggtaaagatgcatggtatcaggtaacgggtagcggaggccgctggagcaagtataagccagaaacaaccaaacgccaggacatcacacgcatttattatccgtggaaacagaagaaactcattctgttaaaagtggataccaacacggttaaaccttatatcgtcgggtatgcgaaaatgcataacctaagccgtgttagctttgttgcatattacgatagtgattcaaagcgtgagattgttaatgatatcgttcggaaaggtcattttgatgaatcggaaattgtgtatctccgtaccagtgaaatgacaaaagaaaaagagatctatgatgcagatcgcgaaaaatcaaaagcgctatatgcaccgaaaaattcagaaccgcgcccaaaaaccccgaccgtatatcgttatgagttggatagtaacggcaatctggcaaaaacttctctgtttatgacaaaatcagagtttttatcactggataaagccccaggtgttcggttgtatggtattgatgaatatagccgcttagatggtgaaaattccaggttgtctatggattcagcaatgaaagaatctactttatcgcgtatcatgcgccatactgggatccctgttgtgtttgctatccgtaacagcctctggaagtggatcccagattcaaatctggtatgctttgatgatatgctgtgcaagcagtatgttaaatccgaaaaggcattgaaagacaattgcttgcctggatggattggcaaggaacactcaacagaaacaaacgcattgcatagccgttttggtgtatcgcttgatcggattgtgaaaaaccgatataatgaaaaactgtataagattgttgataccctcgaacttatagtgtgtctggaagggtatgagaaagatggtaaaaatctttccagggcgcgttgtccgattctgcgtgaatctgtagcatcaatgcgcgttaaacgcagcaatatgaaaaaacgtgttgatcaggcatgggaaatctttaaatcactaaacccgttactggcttcacttgttgaacatagcgattcttattcaattcgtccgatttacaacaacgaaaagaatctcagtgagtttaagaaattaatacggtggaaataatggtcaaaattcttgacgaagtacaacagaaagctatctataatggatggttgacgggggcaagtaaaacagcactggcccaacagttcaacgtaagcgcccgaaccattgggcgcgttatcaaccgcaagttagcggaattccctaagaaaagggatgtaaaacaaaagcctaaagtatcagacactgtaccgcgtatgatcggatctgaatcgttcattacggttgtatacgaagggcgcgttttcatggcgggtgaaacacatccgaactttaagaaagcgcatgaaatgctgaaagctggtgatgtcaaaggtgctgtaacttgtttggatactcaagaagcgatccgaacctatagcaaaggcaacattaaaatcattggtcatcagcttctatataaagatgtagtgtttgattctgatatcactcaacgaatcattcgcgaaatgtataacgatcgtccgtatgaacatctggtgaacttctttgaacggttgatgcgaaacccttcacgcgatgctgtataccagctttacgggttccttgtacataatgacattgaactgaccgatgatggttgtttccttgcctggaaacgtgtacgcgataactataaagatctcgctactggcaaatttgataatagtcctggtgtaactgtctccattcctcgaaacatggtagacgaagataaaacgcgcacctgttctactggtctacacgttgcggctaaatcataccttccacactacgggggcggtattggtagagtcattcaggtaaaggtggatcctgctgacgtggtagcgatcccagtggattacaataacgcaaaaatgcgtgtatgccgttataaagtcatgattgatgttacatatggttttagccattactaactaaacaaccgcgcctggagagttctgggcgcataggagactatcatgaaatttaaaaacatgccttcggctaacgaaactcgcgctagtggtgaatctattctgaaaactgcccgtgaaatgtgggccgacgaccgggtagaatccgggaaaggttacgtatttcgtaaaggatttggtgcattttatgttgcaaccacctttatagtagggtatagttgtttaggaatcgcgtggatgcaacgatatcttgaacgtgctgttctttttgtgatacgttttctgtttacattgatcagcgtagtgattagcatcccatttctgagcatcgccttgtttgttaacgtaaaaacaggcgaaattacaaaattaggcaaactggtatctaaaaaatatgaaaagaattctgacaagacttgacattcacaaatacgcaattaaaattggtgacatgaaacgcggaaccttcaagaaattcgaaggcgtggatctgaaagaaaacgggttttacctggtagttgatgataaaacagggcgcgtagtattccgtttctacgtagcaccaaatcaacgccgtaaaactggtgctagtcgtactctgttacgtatcaagcgccgcgaacacgaaccgtctgcgatggttgcgatgctggaaagtgcttctctgtactatgtagcacatgacaaaatcaaaaacctgttcggtttcccgaacctcaacggatcaacgttcgaaagtgctattcaaatgcgttatggtgctggtgaaaactacaccgagtggaaccgcgcactgaatgacatttatgattttgaattccagccgtattgatgtatactgattaaaactaaccaattgagataaattatgaaactgtttaataaaattcgttctgtagatgaaatcgtagcaactttcgacaaaaccctgtctgaactggaagcgcgtattgctcacgataatgagcaggttgcacaggttgcagcagatcgccaagcagcagaagaagaacatcagcgtaagctggcggaactggcttcaaaagaaagagatcatactgcaagtgcaacccgcgccggacgtatcgcagacaagatccgcaaactgctggattaattctctaaaatggggctgaaaagccccaataaggaaaataatatatgtttgtaatttcttcgtactatgattcgcgtcaacgagtatcgctgtcttctatttccaaagcaccaaaagatatagatgacttcggattgcttaacttcgtcaaaaaagaaatcgaccgcgttgttccagaaaaatacagaattgttaaaggatctgatagcttaactatcgtaaaaatgtatggtgaagtcagtattcaacatcatgtgccattatatcctcgatgaacaatctggtagcgaaacatgcatggattaaccgcgcttctactcaccgcgatcgcaagcgagcacttaaagaagcaaaacgtaaacagaaacataaaggtaagtgtgatgaaaaccgctttgattattcttgaggaaatcccagaaaacacggggctgtatctcgttgaagccgacgaagatatcattgaaatcctcaaaaccgctcacgggcattatgtgaacggatgcaacaacaccccagaacaggatcgcgctgtcgatatcgttaacctcatgttagggccgcgtacagacgacaacctggcatgggcgagtgaatccaacattcctcatgagtatgtcgggatgtattatcagtgcaacgttgatgcagatgtgccactgataccggaaaaacagatcgatttagtagttagaacagggttcttcttatgagtatacaaattctgttcagtaaagaagatccattaggtacggaatcatcggttcagcgcttattctggcatacagattatataaaaaatcgatgtcgtggcccaaacaacacatggggaagcaacaacgatattgacaaagcaaaaatttatcctcgcggaaaggcgtactggaaaatttttgatattcatcttcataaaacaatgaaagattcgaatgaatgatgaaaaagcccttgacttcggtcaggggcttttgctatattagccatatcgaaacgagataccctttaaggagaaataccatgactaacgcaaccgtagttactaccacttacttcatttcttctggtcgtaaaaatgcaatgtacaccttgcgtgttgagcgtagaggtggcggttatacttctgataactatatctgcaacttatctaccgatccggagaaagcggaagcgaaagcgcgtgagtatttcgaccgtgtttcagcccgtttaactgaaactgatactttcaaaatggtattccagggctttgcagatttcgatctgttcgaacgtcgcggtaaactgtcagtgttcgatactgaaaaactggaactgctggaaaaagggatcatgccgattggcaagcgtaaaggcgaagtaattgcagaaatgccaatgtttactgttctttggtgggctgaccagtctaaagaagacaacaaaaacagccctgtatttgacgccgtgtgtgcttactgcatgggtgttgcactggagaaggattatatcgccaaacgcgaagaaatccgcgaacagtgggaacaagagcgccaggaacgcatttctaaagctaaccacatcggtgaaatcaaacagcgtctggaaatgaccggaaccgttgagaaagtgatttcactgggatatactcaagtttcttactacacttctgtagaaagattcatgaccaaaattaatgttgatggtaatgttgttgtttacttcggtaataacattgcaaacgaaggtgatgaaatcactttcaaagcaaccgttaaagagcacggagaatacaaagacgttaaacaaaccatcgttcaacgtgtaaaggttttataatgacatacgaagatatgcttaatgaagtgtgcgcgggtaaaaccgcgtaccgcactaccaaccctgatatgattgtgtttcgtgaaggggatacaatcatcagacgtacacaccgcaagtgtgaagtaaaccaggtattcattgccacggtagaagaacaaaaggctactgattgggatatcgtcattgacgaagaaaaccacgatgagctagatcatccgatattcattttgagtgaaactatcggaattcgaccattcatgcatagaaatttttgggggaatctatgacgttcgatgaggctatgagagccgctaagagaggttgtaaagttgcgccaataggtaggccattcttcgtgtattatcacgacagcgctggatacaggcgggttacgttgggggtttcggcaaggaatgaagattatgttccggatccgtgggacaaattgaaagtttgggatatttacgagaaaaatagcccggtgatgaacttctttaaagcaatcaaacgggctattggaagaacacacaatttaacaccagcattacgttaatcacctcactcgacctaaaatacgcgcggcctgtccacatatgatgtttagcttcatatctggtatattaggccgctttgcgtaccattccatcaaaaccgatccagaatagtagttatcaagattaaaataagggcaactaaaagtataagctactggcacaaaatcacgtgtcggtaggtaggaacttgctttagtggatgaataatacaagccatttatatgattcgtgtactcttcggatgttttatcgatcggataaccgccgaggtttttaggatcgatctgggatggtaattttccctgatattctacaatgtcaacaaaatagtttatattctttggtctgaatgccaataccgctgaaaaatccgcgttggaagtaagatgaactatgctcaactgttccaacgcggattgattaaacttttcagttctttccatttcgatagcccttgtatcgactacaagggcaccttttatcatcgggaatatatcagtccatttgtaccaagttactaccataagaaacataaccattattagaattatttttatcagcaattgtttccatgttttcacacccatcacaaacgagattacccggtcaaataaggctagtttatctacgggatttctctcagccatttttataagactcttcttaggttactatacgtatatttaggatacaacaaaaggctaccatacaggtagccttttaatctatttaatattatgaggtgaatttgttggtttacctatcaaacatattctaataaagcaccaaactggttatccattctagcctcaaaatacccattgagaccgccagcgttttcacatctatatcttctccaaccatcactcatagtagttccgctgaaataaacatcatactggtctccaccggatgcattaaatatagacactttaactcgcctatcttgaccattccaaatagaaaggcaataagggtcgcctttgatatttgtaatagctactagtgaacccacatctccaccagggaacgcattcagcgtcggttggtttgcagagtctcctatgtttactgctaaccctcttttaaagaatcctctatatctagatggatcaccagaagaaccctgtgcatagttaattctgaaaattaaatggaatacgctttgtcctatcatattagacatccaaaacggtgtccctattcttaatttggccccagcttgagccatccacgactcaccagtttcagcctttgctgaacttccgacccacggccctgttactgccatagttatttctcctaaaagatggggccgaagccccatgcattatttagatttaagttcttcaatttctgctttaagatttttaacttcggcagaaagctctttaacagattcaacgagaagtgcaattactgagttataattcagacgaagcataccgccatcttcttcattatcttgagtaactgcttccggtaagatttcttgaacttcctgagcaatcaacccagcagaacgagtagtaccgccagaagtgttatgaagttcataagtattaccagataatgtttcaaccttttctaaagcgttttcaataactttaatatcagatttagctctacggtcagaacgaatctctacgttatcgaatgacccgttgcgagtacagaagaagtcgccgccagccctgaaatagaaattgtcatctcgaccatagccgttaacattaagaatagcctggtgataatttcctacatattcttggaagtataaggaaacataagcaccattactaaatctacttgttaagccagcggtatttaaatacgcgccacttccgccgccagggtaattagtagtactattaacaccattaaagttactaatagcacctgggaattggcaagaaccgctgttccagaagttccacgttggcccagagacaccacctgctcttatactaacgctaccaggctcatcagcccaaataagtcctttttctgtaccatcagctttacggaagaccaaatgactgttaccagtgttctggacgttaaccgaagttgatacaatgaactcttgattaaatctagcccttccatcaacagttaaaacaccgttaacagcagcatctccagtaacccagagcgatgtagtctttaactgatcgcctgtaattgttaaccgcccagttacagtaccacctgctaacggaagatacgtgtcgccagcattactaatagcagaagcaaccttatcatcaacatatttcttgttggtcagatgcgagttatcagtaggagcttggcctgcaataacaaaattaccagaagcaacgttgatgtttccatcaacaactaatccgccgaacttaacgctctgtccttcaccaacaccgaggttattacgagcagcagctacagaagttgctccagtaccaccaagattaatcggttgtacaccagcaacaacttctttccatgcagaccatgctccgttgttgcagtatcgaacatatgtaccttcaacaccaccgctctttgtagtaaaggtctgcttacatgtccaatcgctatcagaaattttacgcaaagacagaacttcaagaacaaagttgccatcagatgtgggtttattagctatattagaaccaccaccagatgatacacatttatacagctgacgagtacctaaatcactgcctttaataaccatgttgttaaggtcaatagtcttatcagaaatatcaactgcgtcttcagtaccacgatatgtctggttaaaaaccaagtccccttctacctcaaggccgctagatttaactagaatatatttactaggagctggattagaaaccgcagtttgataaccaaattgcacgtatccttcaggagtaattttaagcattgctacggtagcaccgctaccaactttacgagcaagggttaatctactgtacttgtccgagttctctgaacctaaatcaacaaacgtcccactaggattttcaacttttaagttagcgttaatagtcaagttaccggtcatggtgtcgccagtcttgcttacttgcttattatcgccagcagtgatatcatttttaatggtgttcagatagttattaaggttgccaccaaacatcgagccagaggtaatattcccgtctttggttagtattgctgctccaccaactttaactgctacaggaacatcaaggcggccatcagaacggaagctaaaatcaccagcagaaacaccttcagtagtttttgcacgaatgttaatttgtcctaagtccgtagtatttggagttgcccaaattacaccgcgttcattggcgtttgttctaaaccatacatgagcatttccgcttcctgcattaacatacaccgatgcggttcccggcccagaagcatggaggttaggtgcagctaaatcaccagacattgtatcaccggcttttttaacctgagcgtcatttgtcagattaccaagccctacgtcggccttagacggtttatttgctgtaccgtaaagttcgttgtatttgacatctcctgcggcaagagccgcgttgttagccgcgtatacacgaactttagcactagcatagtcgatattaatggctgacatggtatcaccagcattcataaaaataccagagccatgactataaagaccattttgaacgctaacaccagatttagtaacaccacgccagaaagtaccgccgtatgattttaagcgggtcaacatatccgcattagagataatgtcgttgatggatttaccaccattaccgcctaagccataagcgccattttctaaaacattaccagcaccttcgccgacatcacgggttgcagccgtacccaaacctaagtttgtgcgagcagcatccgctgtacttgcgcctgtaccacctttagcaatagacagaataccatcagtaccattgtcaaggttaggtttattaatttcgtcatagatacgaatagccacactctcaactaaaccttccggagcagttgtagaagttgtgtaaccagtaggcagataatactgagtatcgccagcaatagacagcagagcaactttaacactactaatgaatgcgcgttgcataaaccacagttctaaaccctcagaggtacgaaccagactataacgcatttggttagtgttatcaattccaggatcaccgattcgacgaacctgtagatgattacgaatattagcgcttgttaaagtggatggaaagtttctagcgctacaatcgataaagtcgatagatccacgcgtagaaccatagttaccgccgttagtcaccatcagttgcaggcggctctggcttgaaccagggtcttttaaaagagcaactttggtccatctaacttcggctccagttgttacagggaaattatcctgcttaagctggcgctcgttctctacattagtcagaagagtgccacctttaccagggcctcttccatccgtggcataataaacctgggaatttctgaatgtcagattgccgtcattagttaattgaagaacgccagagcctctcaggtttttaatgtatgcatcattagcacctacacccatttctagtgtaagagtgcttccattactaattttaacggttttattagtggataatcttaaatccccaggaagagtagtattaccagagctatcaagtaagactaattttctggcttctacgttaccagcaccgcgttgtacaaactggattgtttcagtaccatcgtcaatagtaccgatttcaagaatgccgttattgcttgtaccaccggaaccgatgtaccatccatcattgctggcacatttaccgacgatatgacgagttatttcaccacttaaattctcgttggtgaaagtaatagttttaccttccgctacggtaacggtatcattaagagcactaggcccatcaactgttaattttttggtatttgtttctgggatacctttacccgctaactgaacgatcgaagaaccatttttcgtgtaaatggcataatcagccatgttgatcgccagttcaccatctgcaagctgacttgtagtaggtgttttccccgcaactgtgctacgtaggaattgaattttttctaaatcagccatgtttcaccttaataagatccaaaatctatgatagtccctttagtaattacctggtcgagccgtggtacgtgttcgggacgggaagccgcgcctgtgctcgcgaattgcggggcagttaacagccctgtcattgtatcgccagcgcgtaataccctgctattagcatttgttgtgacattatttatctgtccatcaacataactttttcgtgttgcatgacttgcgtcagtagggttagcggttgtaatactgatttgcttttcaaccgtaatattaccctgagtgtttaaatcaccatttcgagcgttgatgactaatacgcgaccattagtaccggaagatgaacgaataccaataccataccatgatacaagatcaatgttggcttttgataatgtcgcgccatcaccatcaccagaatataaaccgttctggtcacttccgcctgtgaaagtagcgttaatttgtagcccctgtttaaaggcaactacacccaaatattgaccaccgcttgctttagaaacgaagtcgttatttgatgcttgcggtttatcgttttcagtataaaccttatatccgcgataggttagagtattaccaaccggaaccagcggaaatgtgccggagtgccaaataggtaaacccccgactgtagaaccagcttttaaatctgccataataacccctttttacatatttataaggcccgatgatccgggcctttgtttatgcatcaacttcacggaattcggaagcagaataatcgccaccaggataaaccttagtattcggcaattcaaatatatacggtgttccaccatcgatcatgttgttcattctgataccgttaaccccaaactgtgcagcaaagttttgatcggcttcggcagcagatacctgaaccatcacgaagttacggatcgcagataaactatccgtagcgggtttaggataacgagatacagcaacgttaaatccatcacaaccactagggatcgtatagaactgttcaaatcgtaaccactcatcaggtttatttgcaggaacttcaatcaccgatgatgaagtttgagcagtacccgtaaaccatcgaacagtaacccttgttgttgatccagcatccaataatgctttacttgcgtaaaaatcaccagtaatcatcatagccaatccaggagccataccgtaatcagctagtttagagatcactgggtttgcaacaggatatactttatattcagatccattggttgaattgtattcttccgtatcttcaacagatctgaaaggtacaccagttcgaccaacatcaccaacgttatcatagacaaggtcgattgatgcgcgtgaatcttcttttaaaattccatcgttagcgtaaaacgattcaatcagtatacgagattttgcggccccatacaatgcaacatatgcagaatttgggaatctctgagcgaaatcagcgccttgccacataacggatctgtttttagcaaaccaatcatcaacgatttggcttgttttgtattcaccgttagtcattatcaaatacagcccagaaggttgagcatccatatattcaacaaacgctttgtttgcagttgctgaattatcattcgataatgtgaaggttttaattggatcaactacagcattgttaattctccatacgttgatcccaacactaggcggtgtccctaccgccttttgatttagtgtaaactcatactgattaggaaccgcattgggatgtgttgcctttgcggttattctgtaagttacgctgtttgtttccgatagaatttgcgtttctacaaaatcggggccgaaccccgccattaagtttgacattatgccacccactcaaatttaactgtctgagtaactggatctgggtaaatcttaacgttaccaactttgatccaatcggtaacagtcatgtttttaaccgtagtaccaacagcagacgttgcaccaatctcaccagcagtaggcggattgttgctagtatacatgcggccccaaccatcaaatttacccgtgattgggttcatttgacggatccagaaggattgcgccagcgcatcaacaccagtaccagaggtcggacgaggtgcccaaatctgataagtgaatgcagttccgttaccaaactgcgttaaagtacccggtgctttaacataggtataacgggtcacaatcatgatttctggattaatcggatctggttcaagaactggaaccgcataaccaggaagcaagttgtattgtgccgatgctgtgatctcagccgtccagttgcccctagatgcttctgttactgcatccagcgttgaccaagccgcttgacctgcaatgataattgaactgttgcttaccgtcaagcgcccagacatcgtatcacctgctttacgtacatacgtaggattcagcaaggtttgcgcgttcttctcagtaaagactttataagagttcgcagattcttccgctacgatgttgccagcatcagaggtcaggatcttagttgtcttgttgttcgtacccatagatagaacagaaccagcagcagtgatcacggtatcattacccagagtcactttgctaatcgcctgaatttcaggagcctggaatttaacgttagctacaacgccacgagtatcattatacacagaaagatgaactgtgctagtgttacccgtcgagatcattgcaatacgcccagaggctgaacttgcttgaattgaccagtcgttagatgaaccaccattcaaacgaagtttacccattgacgaaccatcaccaacgttcagatctccattaacattcattacgcggaatgttgcatcagcgcttgaatcaatgttggcctgtacagtggttgttctcgttagagtcaacgccccgttgaccgtctgatcaacatcacgacgaatgaactgggaagaatccaggttatccagtttatcagcatcaaccgctttagccccgatcggcagataatgtttcagcgtcaggttcaattcataaggagaaacagcaacacctacagcggcataaccatcatccggaagagtagaaccagccacatcattaccagaccaagtaccaagccccttagacagtttcacagtaccgcgtaccagatcggtagcttgccatgaagtatcaacctgaattgtatttttcaagttcttaggagaaacagccttgtttgtgacggtgccagcagtagtttcagcagccgtagccacctgaatgataccttctgcgctctcagtcgctttcttagcgtgtaacttcttaggggtgacaaatactgtatctaatgtccctgcgttcgtttcagactgtgtagctacgcgtaaagtaccacgttgtgtttcagttgctgattgaataccgatgttaaccgtagtccagatagtcccagattgagttaacccgtcagcagtagcaacagtaatatggcttgtatcgtccagataacctttcagtttagacggtacgatcgctttattcgttacagtacccgctgatacttcggcagtggttgcaattgcaatgatacctgtcagcgtttccgttgcagcacgatcgttaagcgttttaggcgttaccgctcgcgtgtaatcagtaccagcgtttgtttctgcctgagttgcaatctcgatcaaaccaatacgaccatcagtagaggttttcttgtgcagcatttccggagtaactacggtcggaatgtttgcacttgcaacagtaccattaataacttcggtttcagaagccagccatacagcgccagattgtaactgagtcgctttatactcacgaagagttttaggcgttaccgctttctgataatctgaatgatcataaaccccagtaccagcctgagcacgatccgtgttggtgttaggagcaccacctgtagcaacaagggcaaggataccagttaaggtcggcgatgcaatacggttatgcaactttttcggggttacaatcgtaatatcatcggtgcttccgtttgtttctgcctgagttgcgatttctgccaatccacgacgggtttcagtcgctgttctttcgttcagcttcttaggggtaacaatcacatcatccagataggtatcggttgaaagtttgttaacctcagcagttgttgctaaccgtgcaataccacgacgggtttctgtagcagttttatttgctaacgtcatcggagtaatagcagtttcgtcgttcgggttgtcttccaagtttttgtttacttctgcctgtgcagccagagcaataacaccagtacgcgatctgttagttgcgtcaacacgttcaacgatcggacgataattagcaacaacccattctttcgtagctttcatgtaagaaaactcgatatacgggaggtaatcactagcagcattaaatgctaatgaagttacgctaaaccaatcatcgggcggatactctttgcgctgcgggaactgcatcatatttttgttggtgcggatcttgtccgttgtaccatctttaactttgattgtgcagttctggtttttacccatcatataaagggatacgtaaacgcgatcaccatcagcaacatcagttggaagggtaactgtaacgtttggtatagtcccagaagggtttgcagtaacaaaaacgtaatcgttaggaactgcgtttaaatcactatagatacgacgcagacgaacacggttatcagcatcatatactttccattggctattctgtgcatcaaagatgaacataccaaagccggatttctggctagttacagaagtaacaccagtaattgcgccgtcagaaatagtgtgtccactacctggataaatctgcaaaacggctacgttgatagagttcattttatcagcgtcataggttgtgatcacatcaccatcatttgcatatttcggcaactggagagtgattttacctgtagcactgttacggaaaactgtcatgccagattgtaactggaatgaacctgttccggttgcgtttacgatctcagaatcgcggttatccagagtttcagcaacacgccatacgttaccgttatagataaacgttgcgatcatgtacgggtgggtcagtcgatactgtgccgattgtacagtacgtaaacggatctgacgggtgttagacttaacaaggatactgttcacacctactaaaccaccgcaatctttaaacgtgattacgtcgccctctgtcgggttgtccggcagcaggtacagaagttcagtaaagcgtccatcagccataatgtaactaccagattcaataatgctaccgtctggagtggttacgttactataaacccatttcgggtcattacgagttgcaatccatttggattcgtcgaaagccccagcaggggaagcaatattctgttttgcgtaccagatacgacgcgcataaatgatcgccatgtcttgagaatagccacgggtcgggtcatactgctggattccgttaaattcattgaaaaagtcaacgttaacgccgtcactcagcgtattacgatcagccttcccaacgttgataactttttcaccagcagcatcaaggccacttcgtgcgcggaatgatttagctaccattatcttttttcctatattgtattcaataccaatatttatatacaaaaaatggcccgaaggccatttaactgattatttattacttccgaaccatctttttatatttcttgattgtttcgtctgtaatctggtttcgcttatatagaggggttacaccgaacgcctcaacaccacgttcattaaggatcgttgctacgatttcctgtctgataaaccagcgcttaaccttttccggaaactgttcattgatacttttaaacagtttggcttcccaactatccagcgtttcaggatggataatatgatcaaacccttccagaaaatcaatcgttgttgcgtgaatagcgtttgctactttgcgaatgtattctttattcatgcttcacccaaatactctttcaattgcatataaccaccaataaaattaccatctacaaagatccgagggtaagtaaatgccatgcttcgactacgaacacgtttcgctaactcttcaatgcggggccgatcgtaatcaaaccccacactgttatttgctggctttagaacagaataaaattcgtattctaatccatgctcatcaagtaatttccgagcttcaatacaaccataacatttatgaagcgattcgggaataccgtaaatctcgattttcatcaattgctttccttcgtgccggagtgattttgctaatgatatctttctttgtatcagaaagcatacgctcaatcaattccaccgcttcaagttgttgatgcagagaaagaaggttgatgatttcctttttctgttcatcaatagcagcttccttgtcaatcgcgtacagcttattatcaccgaaaacatgctgtaatgcaaattcaagtgcctgtgaatccgtcggcgctgatagtacagaaatcgaagtgatccgcttgacaaaaggataatcaaatcgcagatcattgatatcttgttgaacaggttttacagtcatccacattttaggatcggaagatacgaaatttaaatcaggcgcggcgatttcttctttagtagcaatcttcggttcttcttccggtaaatcatatggtttgaagtatttccagatatggctagggatctcatattcgaaatcatcttgcagaacataagcaatgtcctcagtatccccaatcgcaatacgatcgattgtaatatagccgttgtttttgatcaattcagctaaagcatttcgccaggttttttctgcaaattctttagcgtcgatgttcagggtataagatttaccttctaataattccatgtgtcacctcataaaaaagggtgccggagcacccagtttaatttacttgcttacttctgctacttttcgagcagctttgcgaaccaggtcggaagcagtacgcagattttgaagcgcgtcctcatgggctttaaccgcttcttcaagctgtaccattgcttttgcgatttcttctttcttagccgcttcgtctacattgatagcgatagcgctattaccggaaacgctaacaggttcatcaacagttccggttgccagttcacggaagaacgaacgttcagaatcaagcagatagtaaccaacaattccggtcggggaatcaatggtttctaccgttttgctcaattgatgatgaccgagcgaattcgtatggtaaacggtgtatataccattactatgttcatcggtatatgatttgatcccagggttagcgccacaacgatttttaaattgctgcggtttaaccagaacatacgaacggccttcaacaaatttagtcggatccagttcaaccgacattgccgaaccgccatcaagcatttgatcaagatctgcggttgctggtgcaacaggcgcaaccggagccgtaacgttggcttttttcggtttggctttctttttcttagctggagccgcgccaacttcgacgaaataacgagcttcccacgaacgcagagagatataagtcatttccggaggatgttcaattttgaaagtatctgaatgggttttcgagataatttttacctcgttattcaggaatttttcgatctgcttcgcctggatagtgtttgctatgttagatccgccatgtgaattggtagtaaacccttcacggtcaaccagtttgtaagttttaccaaccacgaacgttttcagttcatttgcttgaactgtccacgggcaagaaccgcgccctgtattacggatggttttcaggggaatgttccacttccagcaatagttacgtgcttctttacgggttttgaaattcaggatcatgatattatctctcaattaaagttaatcgtcatttacgatgtggtaagattaccatagttacacattaggtcaagcaatatttttaatttctatcgaatttttagcgaattcgatcatacgttgattatctgaaccgcgaaacggctttttcgttggcaaatctttttcatacttaccatcaatcagaacatcaatgtaaggaagtagcttagaacgttctgggtcggcctgtaaagcctccagggtatatcctgtccataaccatacgtttttctttggaagttccttagaaacgcgctcaagcagttttaggatagtaggatagttgtcacggtaaagcggatcgccgccagttaatgtaagtccatcaacatgcggattactcaacagagaaatcagatggttttctgtctcttccgtgtacggtgttccgttgcaaggattccacgtcgatttgttataacaaccttcgcatttatgattgcaaccagtcacaaacaaaacaacacggatcccttttccgttgaccacatccatattatagatgcggtcgtaattcatgctttttcaccaaacagacgttctctgatcgcttcgtcaataatgtctgggaactgagtgttaacccgttgcattactgctttgcgtacagtaacttccaggttattcgagacgcgagcgataaacgcggcttcgtctgcaataatgttttctgttgcatgagcaatcgcctctttctcgatatctttaagaatggtttggcattgctgttttaccgattctttgattttaccagacagttcgcgaacattgccatagttgacatcgaaaacattcgaataaccataacgtttttcgacgtaatccgagaattcagatttgatgatctgtgtaatttccgatgagttcggcattagaacagctaactgttcctggatccgtttgttgatttcttcgctaacacgcttaccaactacgctattcaccacgtttttgatgatagcagattggaggtctacgcgggcggttgaaccttccggaaacaggcttaacaccgcatttgtgtctaatttcagttgaatcatttcatgttacctttcttcacgaggatcagttctttgatccgttcaacaataacgatgtattcccatttagctaacttttgggtatcacaccacttttgaaactctttcatagcctctaagtgacctttactccagtacatttctgcaatttcgttgcaaagagtttcagtagcagtgtttttgattttcataacatcctccttagttgacaagaaggatgttactacattcagatatacaggtcaatacttttatggataatattgaatgaaaaatgaaggatgtccttcgtagttcacatcaacagcaccaattttaacgattgcatcgcggcgggtagcctcttcgacaatctgatcggttaggcttacaatctcaccggatacccaatgcaatttgtgttccggatctgtagccccacagaaaaacagttcaatttcgttagcttccagttcacagcgtagatagttcaaattacgtgaatttgttttgttgaaaatcataatattgcctcaaagttaaattatcgtatatcatcccgaatcgaatcaagaacaatgtaatctatcccattcactcgtttaccactgggtttacgatagcgaatgttacggcctttcatatcagtggcttttgaaatgtagaatgacttcgtttcgcgtagccattcactccattcctgatatgaattaccgacatttcgacgcactttagcgtataacggaaacatcacaaagcctttagtttcgcaagggtggatttatggatttcagcctgtttttctgaatttttcagattgcgttcagcttcccggatcaggtaattccggcgagagcgcaacaagttgagaacatctttcgctttacgggcgcgtttaccgaacagatgacaagtaccgagattgtcaagcatgttcaggagatcatagatttcctttgcttcatcctcttttggtaataacggtttctctttaacaacaacgtgttttttgaataattcacgatcgctattagtaaaaatgtaagattctgattcaaactttgtaccaaagtaatcagtaaaccctttaacaccgaatacgtcatactcagtaactttaataggaaatactaccttagacaaatcattagccgaaaacgaaccgccacgaatagccaagtttcggtatgcagtcccaaagcacgtatcatcacgaaaaacaaatttatcttttgtccaatacatcataaatccctcaattttgcgccgctaatgagaacatctttcatttgttttgcggtgcggatagtagttgccagttctaaagagacatcattacgatatgctgtgccgtcttcacacagaaccaaaccaggacggcccttgatagggttgatgacttcaacgcgagttggatgattttcaactttgtagcctaatgcaaacgcacatgctactacatcggtcattttcttagtcagtttcataatctgtctcctttttcgataggcccaatataacaaaagccctcaaccgaagtcaagggctttttgattaattttgatgcttagtgcgatgcatcatttctttgttcttaccttcgttgaacccacggacagcgggagcacccaaatagccgcatgtacggcgcgtgacgctcattttttccggatcatggttcccacaatgggtacaatgaaaaccgtcttctgttggtttaaattcatcatcagagccacactcaaagcatttatcaaccggaaggttagttccgaagtagtccagtttatccattgcataatcccagactttttcaagggcttccaggttgtttttcatatcagggaattctacatagctgatatgtccagcagttgcaatgtaatgataatcggcttcatagtcgattttctcgaacggcgttaccttgcggtcaacgtccagatgaaaactgttagtgtaccagcctttatctgtgatccctttgatacttccgaatttctcatagtccagtttgcagaaacgatgacatagagattcagcaggggttgaatacagactaaacccaaatccggttttctttttccatgcttcggtcgcagcgcgtagatattccagaatcagtctacccatgttctgagaaccgatccggtcgaatgggtgttgtccagatccgaaaagcatcagagtttcatgcaatccgatgtatcccagactgatagaactacgcccatttttgaacagttccagaatttcatcatcgggtttcaaccgtacaccaaacgcaccttctgtataaaggatcggggctacactggctttaacacctctgagactatcaatacgagtcatcagggcttcaaaacacagttccagacgttcatcaaggatacgccaaaatgcatcatgcgcgtcttcatcttcctgtgcttcggcttcaatcgcaatacgaggaaggttgatcgtcacaacgcccaggttattacgtccatcaagaatttcattaccgtgctcatcatgccacacactaaggaaactacgacaacccataggagatacaggaatgctagagccagtaatacgacggttattagccgcgctaataatatccggatacatacgctttgaagcacattccagggcaagttgtttgatgtcatagttttgatcctctggatcaaggttaattcctttttccataaacataaccagtttcgggaatacaggggtaatgccctttttacccagtccacgaatacggtttttcagaatcgctttctggatcatgcgttcaaacattcccgtaccagtaccgaaagtaatagtaacgaaaggtgtttgtccgttggcagtatgcagcgtgttaacttcgtattcatacgattggaaagcatcaaatacgtctttttctgtttttgaaatagcataatcttttactaatgctacttgatatttgcgagcatcacgtacatgtttagcgaatgtcttctccacataaggagccaatactaaatcgacgttagcaaaggtagttccgccgtactggtgagaagcaatctgtgcggtgatctgtgccatgagagccgtcgcaacaccgattgatttcgggggttcgatgtctgcgttacccatcttgaagccattagccagcatacctttcaaatccaccagacagcagtttgtgtatggcgtgaacgggctgtaatccagatcgtgataatgaatatcaccggaatcatgcgccgcaacaatatgtttcggtagaatatggttacgcgccatatgtttagaaacgataccagccagaagatcgcgtttagtcgggaatacgcgagaatctttgtttgcgttttcgttggttaattctttgttactaagagtcatcaaacccttgatatcacggaataattttccgttttgttcacgggcgatatcacgatcatgacgatattcgatatatgcacgggcaacagtcggatttgtcttcattaaagattcttcaacaagttcttgaatttgtgaaatcttcattgctttaccgttgcggatctgactacgcaacacaagcatgatcgcggagtcagcatccgtcatcgtaccgccagctttatacacagcattgcgaattttttcttgatcgaaatcgacggttttgccgtcgcgtttttctactttcatttcgttgccttatggataatatctaaattgtgtccaatctcgttaagatatttgatcagttcaaccccgtcaacaggtatatcccgtcctacaatctcaaggagttcccacatatcaataacggtgataggagaaaaattagtcaatgtgcgaccgcgatcatcaaacatcgttcggtctttcggtttgacataacacaaatcagagtcaccccttccaagcatccaatcatgtagagatatgatctttttgtcagtggaggatatcaacatcatcagctttttcttctgttgcgttgataatcgagcgtttagatatttcatttcgttgccttcattaattgctttctatattttgcggttaaggctttgcgttcgtctttgtcggcgtactcgaagcccatagaaaccatttcggcaatcatatcaggtttggtaagtcttgaaaaccattttaccttatctggtatgaatttgtcatgaatacggttttcggaataatcttgtttcagatatgcaagcaggctttctagccattcgatgtaatcaacatcacgggaaaccagaccagaacgattaaatttgtgctttacaataccttctgtaccgttgcataggttacataggaggccgcgcacacgtccggcattagagccagatagagcatgatcatggtcaaggtgatgtttttcaaggtcaccctctaaagggcgaccacataacgcgcacaagccgttttgctgttcaaaaagagcttgtttaatggatggataatctttcttagtaatacgtttagtgagcataataacaccaatcaaataaaggtgttaatatttatcccaacgtgcgaacgtactcacgcagttggtcaaagccgccgatgtgcttaccatcgtggaaaatttgaggcatggtcagtctacgagtacccaacaggctttcgagttcagaaatgaccgtttcattcaggatcggtttgccgtctgcgtctttttcatcggctacagaaacaaactcatattcttttcgttttgcgtccaggagacgtttagaattcaggcatggagcgcaattgtaaacagaagggatataaccaaaaatcttaaacatatgttaccttacattaagtcatccagtgtttcagggtatgtatttacgtcgcgtttctgatagttacacacgtagacttcttgcgttttattttgttcgtaagaatcagtatgctggcctaacagatactttttatcgaggttatgcacattatatttttgcatccactcgatcaggatatcattttgctttcctgcatgatgtgtcacgtttgataaaccaaacttgataccccgctcatgcagggagtcaaggaaagcatataactcgcgttcgtgatctgcgttccagaatttgttatacaccgcatcagtgatcagatacggaggatcgcaataaacaaaatcgttatcgttgatttcaatatcagagtatgaaccagaacgaaattcaattcctgtcacattctttttgaaatgttcgaaacgtttttctgtcataaagttgagggttcgttttcctacagcagcgttaaaatcacctttgtcgtttgtccggttaacgttgctgaatgaatgcaggatcaggacatagagccataaaggatctttgttctggttgtattcatcacggaatttcagatactcttctttcttgtctttccccagccccttcgatgcaatcaattctcgcaccggagacaggtcaggaagcgttttaagacgctcatacatatcaatcagcgtcttatcataatcgttgcttagaacgggtttagggacgtttagcgacacactaaggccaccgcaaaaacaatcaatgaaacgcatgtatgaacttctttcggggaacagcttgaatagttcaggtaatagcgattgcttgtttcctgtgtatgggatcacaccataataactcataattcacaaagccctttttcaaattttgcaatggtatcgtacttgtaaccacgattcactataaagcattgagtttcacccaatttattgatcatgtcaatagctttctgttcgtctttcttacctcttaattgtaaggcaattcttacgatctcttttagtgtttcgtcgttgacttcttccagtttaaaggaatacccagcgattttagcaaaaagccccttgcgagctacaaggggaatgttgtcatagaaaatcacggttcctttgttgtttttgcggatactaaatcccggcacggttcctaatttcctctaaagtgtcacgggaagtaatctttccgttgacatagtatgtgatcatagcatctttccagccttccggcactttctgttccagagtatcaatggttttaaagttaacaccatcagtgatagtcatcaacaacccttttttactctttttccattcagcgccttttggacatttatacacaccagtccacacaccgttaattttgattgcgcacattttcatcgcatatttttgagtgtcgcgggtaacttcttgaagcaatccgccgcccataccaaacgcgatgttttcagacgcccaacggttagactccatccagttcaacacccgattgattgtttcagggccatgaatttcatcgccttgaatgatccttactgctgggtgtagtactttatacccttttgagttcactgtatagccaaagatacggcccagttcttcaagagcgtacatgatattgtctaccatatcaccagaatccggacgaactaccagagtaccgcccttagaaagaatcgaatctttatattctgcgatacggcgaaccgccgctttaaaatcccaggaatcatacacacatgcatacatcccttcgccgaagatctcaatactgtttttgtacgcaaggtcttcgttttctttgccgtaagaaacggtagtggaatgttcgcgagcaggaattgaaataccagccgccatttcaccatcatcaaacgctttctgacaatcttcaaacagagagatagccataatcagcgcttctacggtatcagtaccgaggaagttatacaggtgcgcgaggccaccaataccagcggattcagcagaagaggttccacgtgcgccgaagtcatgcaaacgggtacgtaacaccatatcaaatgcttcgccttcgagatcagaggttttcttgagatatttcttcaacacttttttacattcgcgggatagagttgctacggttgaagggaaccatactcccctgatcgccagggtttctacgtgtcctgctaaccacagcgcatttttcccagcgtggaaagttgcaaccggatttttaaccgctactggagttccttccggaatcgctctgaattcaagagggatgtaacccagttcagcaatttctttccaacctttgtagttgaagatttcgcgcccaaagtgcattttgtacaaccgattagcaaaatctacgtgttccatagtcaccggacgtgataggatttgcgcaaggcggttacagccagccgtaactacttgatcaaatttaccaccacgagattcaatataaaacagcgcctcttcggagccagttggatattgcgaccagtgagaaaccttataggaatctacggaagtgatgatgctgttcagttcttcgaaagttttgttgttcataaacgtactccacgttttaggtttattttaaaatacccgatccagtcgttcgggatggattgtattgtgatatttagacttacaatccttactggtttttctgccattcgaacagaaaactttgtgatacgttgtctttgtgtgtttttctttgcacacaggacaaacaatcacagaacctattttagcagccttagccacttcatacaagttctttacatcaatttgtctttcttttgtgataacccgaccacggaattcagcaacaacagtttcatcacgtacagaaccatcactatactgaactttttgtttactactttttcgtttggatcctgatatttgagaggaacccgataaaagtttacggagttctaaacggtctttataagcaccacgattaacgcagaaatattcaccgtcttcttcgtcatcaaaatcagcccaatcttctaaagcctcagcttcatcgctcatagtggttccttagaaataatctttgttgctcaacaggtaaacccggttatcgttgtagtcaatgtaagcatcccaccaaccagcacaatcaacaccatcaacttccaacgcctggataagaacgctacccgctacgttgtcgtattcgtacattgcatgtaattcatccagcattgcttcaacattggcccgtaagcctttaccgttgttagcaacaccttttgcttccaggcaatatccagcataagttgctttcattacgatttccatgatgtttatccttctgagttagtgtcttgtctacgggagttagaatactactataaccaacccccgtcaacacctttttaccaactaatgtaaaaagtgaattcacttacacggcgatctgttttcctttcaggaatgttgaaaccgaaaacttcgcgttcttcctggtttcgatacgtttgattgtacttactagccagagaatttgtgatcttagcggcgttgcgtttttcttctgtatcgaattttagcccttcttcttccaaccattcagaaactcgttggaatgcatagcgagtacattcaatacccagacaagagccgatatcgtgcttcatatcatagataaggttttgttttgtcgcgtgtttcagaacaccttttgtgattgtatcccgcgcatgttcgatcatcttagtattctgatcgttgataatttctcttgctcgttctgcgagagtgggtgatcggccttctaccggagtttcgccgtcagtaccgatactacgtacatgaatcatattttcacctattgcgttattaacagcccatctttcgtatgtttcacgaagtaagggcgcatgttcaattaccataaaaaatccaacgttgggggtttgatattgatccctaacgtatcacacacatcgttcaatacactttctttgaagagattgaaacatggaaccctgtacaacctagccaatcttacagcgatcgcggttccacctttaacacatccttcacgttcttccgcccaaaataaaacaaaatcagttggattgtcaagattttcacgaagaacttgaatcgtgtttcgcgcataccttctttgaacgtattcattctgtgtatcgaagttacctgctacctttctggcttcgtcagcggctttctgtgtgtttaaatctcgaaagtcgatgatatcctttccgtttgagaaaaggccgttaaacccgttctcaggaaggattatacatctgttatccggactatagtcaaacagaaagtgactatccataccaggagcgccgccagaataagccctgatcccgcgttcgttcaaagcacgtccgattttaacagcaatgtttgcgatacgttcaggaggtttacggctaccgatcagggtagccgcttttgcatcaaccagaatctgattaaaattcatggttcaggattttgccccatacagggcgaatcatgttttgggcttcggttacaaacagctttttagccattgctgggtcttcgaactgttcgaggaaaggcccatgattacggctgatttcttcgatagcatcctgaaccgttaagcccataatgcgaccgaaatctttcgcagtgatcgaagccagatccagtttcgaaagaacgtttttcacacggttctctgtaaggtaacaaacaaactcatcgagttggtttttgtctttttctgacagtgaaaccggagcattaaagcgggttgctttcttcgctttcttctcagtgaatttggttgttttgcatttgattgcaacgcgttcaccgtttggcataaaagcaggtgaaacaggtttcattacaaagccttctgcaatgttgccctcttcaacgtccatgataggatatacgaattcaccatatactgtattatcgctaccaatgccgctatttgctttattcacaacagattcaaacgtgatcggcagttctttgatctcttcaaaagtaccatatcccaacagaggggccattttcaggccatgagatcgagagatcagcgagcacaggttatccggaaggaattcaccatttacacggatatcgaatacatagaaatctttttcgccgtaatcaacatctttctgtacaccgcgccccgcaaattcaccgtagacttgaataaccaaatcatcataagttccggtctttttgagggtttcccacatcttacggatccctggggaatactttgcaactactgctgaacagccataaaaatcttcggctggcttaacaacatcagtacgctttgcgggggtaacggtaataccgtcatcggtgataaaactaaagttagcaccgtggatcttttcacgtgcaacccacacaccgccagtaagcccgttcataattacaccattgatgaacttaccttcataatggttagtcagagaagaatatttcttaaacataatttaacctttcattttcacacgtttttcgacttgataaagtgctttacgcagcaacttcacttttacttcatccagaatgacatcacccttaacgaatgcatcaagctgtgatttttcggcattagcggcgttgataaccgctattgtattttcttgtgtatatcccagacgtggattaatacgttccattgtacgggcatatgggctacctggtttattgctaaacatcttgccggaatactgacaacgttcagttgtcatcaacactttccaatcttccagagtaaggtcaaaagaatggttgttctttgcggcgtgttcatgcttgagattatatgaacgcgcaatacgcaaatccagttcaatagcagacgcacggcggcgatgctcgatgagttcagggctaagggccacgatctcaggttctttcgctttacgaaccgcttctacatcaggtgcggcttgatttggttttacgtttgaagtagcaatactagcccaacgatccatcgcagatttacgcattagataatccccgcatcttgaaacgccagcgccatagaggtgttaagatgttcgcgtttaaacgggcgaggtttcttttctttcttcatcggacgtttagcacgttctaaattgtacacacgcttacgatggatttcgatcgcttcgcggcgcattgcatttttaacagggagatttgcagaacggaacgcgcggatacgttcaatttcctgtactacctggtaaatatcgccgttatctaacccatgttcacgggcaatttcggcataacctttacgcaaatcattgaatttgaaatgaatttgcactttttcagcttgagacagttcggaaatgctacggtgtacaattttcatattattttcctttggtagaatcgatttttgcaactacattcaacacgctatcgtttcggctgtcaacattttttagaacaaaagttactaccgtatacactccagcgctcatgttgaaattgtcaacaaacgggatctgctgatcatcaagagtattaaccatttcttccatgtcatttggatggtcaacgttgatgaagatactttccgatacatgatttttgtatcgggttccaattcgctcatcgagttttttacacattacatcaactaacatttgtttgtcaatgcctaaaacaccagagtagatcacatgatatagtttcatacaatatccttttccgattcattaacaattgcaaaggaaaggaatgtaaaagcaacccctaacccgaccatccagatagccgttaaatcaccataaattgatgaatacgcgcccatcacttctaagcgatatcccagcaagaaaacgagatacgccaacactttatcattcataattcctcacaaaacgcccatgctgcatggtaaacgctcgcgcctttgtcttcgttcatgcatacaacatcaaccggacacacaaccctgtacagaacaggatccccacctatagaacgcgcggcccttccagcgtatatacgagctaacccgatatcagcggtaaagaaaacacggtctaaatttttctttctgcccttttcagacagagtatcagaatcacagggaggcaataacatgctttcaataccagcagcagtacacgaaccgtgataataaacaacgttttcatttctgcaatgtatcgttttcatgtatcctcccttaaaaagatgcttacattatatcaaatggataaatccatgcaagaaatttctcggtctacatcttcttttgttttgttgacatacgccaggtattcatcggtatacattttccgctttctggctattctttcagcagccgcgcacatttgagcttctgacagtctataagacaacctttctccaaatccttcaacagttagacgaacgaaaggaaccgcagaagttataatgtcattaccatacgcataaccatttttagcaaatacggctttgttgaatcgttcatggtgtacgccttcaacctcaacctgatcaccatagtaagcaatagtatcaacgcgatggttaagaatgatagcaccagattcaatgattttcagtgcagcggcctttccttgttcgcgagcataagccacgatttcataagaaccgatatctatagcggaaccatgattaccaacgatgtaaaacatggaattaattaggtgcttagagatatatgcatacgttttatacatctgatactgttcattacgcagacacatacccgctttgtattcacgtcgtaactgcataagattttgaatcacttcatcaatacgccatccgttagggaattcggcccttttctcacgtgcgatatggatcaacgcgtttccatacatcgcgttaaacgtcatgatccggatcccttcaacataaccatcgataggggcttgccatgtaatagggctatacttcggatcgtggtcaggacgcattttaggggtatggtggcgaaggaatccaacgtgagccgcaaaaagatcttcaatctcacgggagtaatagttgtaagagtccatgtcacggttgcgggaaaattctacaatgaagcgatgtaaattgattttcatatcatataccttatggtttaaagttcttccggcctatccgtcgaacaccctaaccatacaccactgtcagaaagcatgtcaataaataatagaaaataaactggagaattttacatgaagtcatttaaacaattcacagaaagcaccttaaccgaagcgctgatcaccttcggaggccgtgcttatcctaagttcggtcaggttgttattcttgctggcggtgctggttccggtaaaggattcacactggaaaaactgctaggcatcgaaggtattaccctggacgttgacgccctgaaaaaacttgtaatgggtagcgataaactcgcagcagagatcaagaaacaaacgggtcatgatgtcaaaacaatgaacctcaaaaacccagaaaacgtatctaccctccatcatgtgatcgccgacgttttcaacatttccaacaaaaaccaaaaccgtgtttattccggtattatggcagcaccagaagatcgtaaacctaacctcatctttgacgtaacgttaaaaggcatgagcaagctggcaagcatcgcgcgtgatgtcgaaacgctgggatacaaaaaagaaaacgtacatatcgtatgggttatgaacgatgtgcatattgctatgcagcagaaccagaaacgcgatcgtgtagttcctaaagaaattctcatggatacccacgaaggcgcggcccttactatggcgaagatcctgaacatgggtgattctcttaaacagtatatggacggcgacatttggatcagctttaacaaagttggtgttgatagcgagatcaagaaatcaagtaacaaagggatgtttgttgttaagtcaaactacatcaaagttaaagcccgtggtaagcctcagaaatctgtagctgaactggataaggaaattgtggctaaagttgcagcatacgcaccgaaaactgacacttggggttgacattaatgattaaacattatagtatgcatacacaaactgaggaattgatatgaataagtttttctttgatatggatggtgtattgttcgactgggaaggttcatttgtgccaatgtatggcgaaccctctatgatgacagaagatgagttgaaaaagtgcaaagcaaaaattgccaaaactgatttctacgaaaatctggaaccaatcaaagaaggatttgaattattccatcatttaagaacacttggtgatgtagcaatactaaccagtgtcggtaaattcaattctgacggtgttgccgaacaaaaacgtaaagcattacaaaaagtattgggttacgttccagaattccactacgttaaaagtagccatgaaaaagcagcattcgctggtaaaggaattctgtttgacgatcgggcaaaagcggtgttgcctttcagaaaagcaggaggtaaagcaatcctctttgttggtgataagaaaacagcgcttgatgaattaaaaagattgtaaaagaaagggaaccattgcggttcccttttttgttattgattagcctttgcaagcgcttccgtgactagctgaatattttcttccagggtttccgcaaggaaaataccaggaactttattagctagatgagaattgttccagatttcaagatgtttctggttgcgggaaatcagaacaccacgataggcatgttctgcgaactgttccggatagtcaatgcgactaaaatcgagacgagggatccccagttcagcgcaaatcttatctgtatagttcagtttttctttcataacccaaagagggctgaccgcttccgcgcgaagcagcaaagtagcaggatcaccgattcggcgttggaaactccattgaaggaggtcaatcccagcctgaatacggggaaggtttttataaaaatcagtacgcaccaaagaagccgccatttcgtcatatcgttcctttggcgttccttccggacgtacaccgaacttatcataaaaagcctgagaaaattctgctaaagtgtcgtcgaaatcaaaaagaagtgtattcattgtttgccttattttattggtcaggatctggttcaggagcaggagtcaatgacaacagactaaccagtttaccattacgagattcgattacatgaatatcaccataatcttcaaacgcctctttcagagtatcaaactctaatttatatttttcttccgcataatcgcgccagtcgtcgcctttctcaaaagcatcaacgataatatcgtatagccagtatggaagatatgtaaaactggtatttctccacggaataggatgaaccgtagtccatttttcagttgccatttaaagcctcttagatttcactcattttatgaatatagccgtttcgtgaatcctggatctcacattcaccgttttccatgaacgctttcaggatcgtttgtacttcctcactatacttgtaatcagcataatcagttttccaatctttaccctgtgctttttgataca

SEQ ID NO: 19 - DNA, 107253 bp, Unknown
  bacteriophage strain capable of infecting bacteria of the genus Klebsiella
tttcgtgtcatcatggttattattatgaccctagtctttttgcagagttgccaataatgagcggcctaatgtttttgggcgtgatagttattagcgcaatcattaccctgctaatagtttcagttgtaaatcacttttggcctgagtgtttccacggcgatatgtaggaatatcgccgccctccaccgcgtgaccccttactaaaatacctcccccaaatttaaatcgcttagaacgcttcctagaccccttaaaatcgatatcagcagaaagtgttgccgggaaatactgtataaatatacagtaggataacctgttgataagtctgttgataactcgctaccgatcgattgaggcgtcaacctaatttacaattttgtataactctggggataacttaaatgatagtgtttctcacttcctttccgaaatgcgaatcattctcattcgtattcagctcggtaaacgcaaatcattctcattcgcattcaacttctcaaatgcgaatcattctcattcgtatttgcatttccgacccccggcccttcctgcgcttatgtgcgaatccgacaatttgtcaagcaaaatattacgtgaggctgctagggtatgtgcaaatccgatgaaaatttatttttaccgccctgggggcatgtgcaaatccgacaaggctagctgacacgggaaaataatttttagggggaaggcgcgcagtttgctgcagcgcagcggtgggcgcgagtctgggggagtatgtgcaaatccgatgggtatttttggggagggataaacggggttaattggggcaattcggggatgatgggggcagggggcagataagggaaaatattatgagttaaatgggggtaaaggggttgacacagaaaaaattcctgtggctctaaaaaacaagcgaactcacggtgacacaccgtgtaaaaaggcttgaaatttcaggagatattttataatcgcagaatcgaagattttgatccacagctaccatttgctagtatatatgtgcatatccgatattagtttttatatgtgcatttccgatgatgatttttatatgtgcatttccgatagtagtttttatatgtgcaaatccgatgatattttgtgacgcttaaaacttgggcaaaccatgtgagtttgtgtggaacttcgtgagaactttgtggagtgacgcttaggacttaggcagctagcgtttttaatgtgggagatgtgtgaggacttcgtgagatgtgtggaacttcgtggaattgtgtgagtttctggaaattgctttccgaaaaagtgggttggaaaataaccgccctccccttaggtgtgtggaaagaaccgccctgtcaccaggtgtatagaaagatgactagagttcaaccctagagccgcgaaacgatggtgtgtaaggattacctacttttaaacgtgagtaatcgtgagttcattcccacgtttcccctattttctccttagtttccagtaattaataattccccttagggttttaacgagctatcacacaccccggctagcgatactgtgcagattgatcaatttttgtaatttcgcactaagtgtcttgagtcgggacagggccctgacacttacgaaattgaaaaatcaatatctgcacatctctagcggatgtgttaactatctatttaagctaacttttttatcttatagagttattctaacatacatctgaaataatgtcaagaacttttacgggagtgtttgaaaaagtgtcacggggtagatgtttaccccgtgaactcgtagactacagttgagaacgtaggttctctaactcagtgaggaaggcaggattcgtttgatcgaaatccttaatgaggaggtgctgatcaaaggagaattcatagtcttctccgtacagcttaatgaagagatctggatgttcacgcttcaacacaacatgcgctacgatactcggggtgatctcaccttcttgctggtggtaatcgaatagctgtagagtttcatgtctagtttccggcttagctggttcttctttctcaatgccccaaggagtgacaaacttaggatcaccaccagggaagacagatgctcgcatcttataaacataagaattaagatctttcattgctttactgccttgccaaactgcgaagatctcatgcttaccttcagatgctctgacaggtaagtaatgatcagggtagctggttaatgcacaacggaaggggtcaccgttatagctaggagcgtgagaaccataaagtgtgtcatgcttcattcgctcatcttctataatatagagttctttgatttgcggatacgagaaccactgattgagaaccttaacagcgaagcggtgtgcgtacggtgacatcttgagaacgtgatactccgctcctagatcatcttttgccgagctaccatcttcgtttactgcgtaacgtctacagaacatttctacgagtctacgctcgttagttgtgagagttgagtatttacgctggtgcagctcataaagctcctctagcattccctccagcttggttaccatttcttccgggtacttcgggaatggtttttctactgcgttcagtacagtgttagacgaacttttacgtgatctttgtagtgcatttttaaatctgctcattttcttttctcttatagtccattggactctttttatagccacgggattgtggctcttaacttacttcattccaccgcggatgtgagaacggctctctacctgtcaagcgatccatcatcctccggtgctcccgctctctatgttcattaaacacctgaagagcggcgaaactgtccactggcgtgtacggcacgccgttaactttgaggatatcctcgcctctgatcttgaatagcgggttgtcctgctgggccttagcgtggcattcgctcaagtattctgagaaagatgtgccatcttcccgagtacacagggtacgaagaagatagctacaattctccccaaccggagtccatacttcatatctctcgttcattgtgttatcctcttacataaagaaatcttcatcggattcagctatttctttataaaagccgtgatatgcggcaactgcctcgctaggtgctgccatgtcgaataagcgtgctctttgttttaattctgctttattttggcactgcctaatcatttcttcgacttcttgctgcaagcgtgcatctacacgaaccaccagctcaccttcgtgaatcgacccgactttataagttaacatcgtgagatagcctggatgctgtcgagactttttgagaaccacgttagtatacgctgttaactcatggacgaatactgcacctgggaacacataaggagttagcttcttacgagcttttactgccttaatatctattaaatgaaagaagtctttcggagtcttggatatgtcgtccggtacttctaactggaactgattccagaggatacgtactttgctttcagacatgccgtagacaatgtacgtttcgttagcttcttcaaaatcaactgtacagaataacatatcctagccctcttacttgttgtagaactctgtagcactatcccattttatgagactctcgacattggcttgatcccagaagtttctggagttagtcaatgcagaaacatgcggctgaataagttcgaacttctcaaccgtggcaccactagtcagcagtaacgaggttaacgcttcgaacttaacggtatcgctaccggacagctcgcttactgctttaaccttgtcaattatagagatcattttagcttcttcacctacgaacgtaaagcgcaggttgcggaagcggaaggagattccagcttgcagtccatgcaaccctgttgtggttgcatttggcataaacttgatctcagatactgactggtcagtcagatagttggtactaggattattcagggaatcgtatttcatctttaacctccaaaggttttatcaatttactggagttattataccaaataatggagtctccgtcaattgaaaatttatgatagtatgctggcacggtgtaacttccataatccgtaactctagtaaccatgcggtgtctgcatttttggcaaccgttaccctcaaggtggcttctagcagtttgcataaagtaatcttgatggtctggacaccatatttccaccagctgatttaggctgtggaacactagcttctcatatccgaagaataccccatgagcgtctagagcacggttaataaagatgaggttcttagcatcttgcctgaaatctggcctcagttgctttatcttattatggttgatcgaaccgtcgcgtttaaggaactgattaatggggaaggatttagcttcccatactagttcttgatttatcttctgtcttaattcttccactactcaaattcctttttcaacctctcgtataggtctctggattgcttccagttaaggtatactcgattaggttgattacctcccccacgctgagtaagtataaaacactctttcctaaccttttcgatagtaactgctgattgatctacaggattttctccccgtaaatagttgtctatagatttcatttaatatccttaaaccacgaaaggccagagcaattagccctggcctctttgttaggtgaacagatccagaaactcctctggataatcggaaggatctccaaagtcgatgtgatctgcgttaatcgggtagccttctttcgtcttgatgccctgaagaacatgggccaacacgtcaaagtctacgctgctgttgttagtgcagcttgcccaggcttcctgacggtggacgcatttgccgtccaccataacctcaacaccgtagccagtattccagcaaccgtactcgcaatccccagaatcttcttccaggaagtttaccacaacgcgtttcttagccatttgtcacctcttagtgaatagtaccgtcgatgccttccacatggatatcaattgccattttcagcattgactccgatttatcaaactctttcttcgaagccaggagtgcttcaccacgagctttaccatactctgcaatagcgttcagggtatgtttcaggatatcgtcggcagataagccctgagtttgccagtggacttgagctgtggcgatattcaccataaacttactcagttcaacacgttcttcatcaagcgcctgcattacatgagttttgcagttatagaaagagttcaggcaaatgtcttcttcggtcaggccttcaaccagaagcatcttctcgacttgcgccaggcgatcaagccacggattttggagcatcaaatttttcacttgcatggtataagttcccgtcgttaattggtgcgaatgattttgcattgcgttcaggacgttgtttagcaatccagcccagcatcatctgtcgcggtaggacaactgctgtgttctgcagcacttcgtagatccagtagcgtgcgttctggtacttaccgaactcatacgctttcttgaacaagccccaaaccacgctaagctctagcgtctctgcatttgcagtctgccggaacggtatcactttggagccaatgagttctttcagagcggagttgatatcctgatggctgaacgtggtctcatggaactcgttgaagaaacgatagtccagagcgttattagcgttgacaaacatctggatgaacagatcgctgaactcttggtgctcacgattaaaatattgatttaaaacttcagttgatgcggccatctttccacccgttaattgctacgagatacatctcgtaaatgaatacagtgactggttgaattgcttccatgtagaacgtcgccgggacgttatggaagactgaaaccaccatggagaggaacaatgcccagcctaggaaacggctggggagttctctccagacctggaagttgcaatccaggaagttatagattcgaagctgattaagcattggtcagtctccagtaatagtgacgagtattaaactcgaaaggttcgtcggtgatcttagtgtgcagcgtgatgatatccggggagtaggactttgccagatctttgcgaaccatcacagtgttaaacggagcgccatcagcacgttgtactactattgccaagcctagaggcggaagctcactcaaaggacgccatgagtccttttcagcaagctcaatcttggcgattaaggcaattgactcaacgatatcttcatcacaaagcaaatcgtggtctactacctgacgcagagcatctactaacacttggcgttctttggagttaagattcatttttcttccttcttaatggtgttttcaatatcgtccagcaacgctgtgcagttatcgtagttaactttgccccggccaaagattcttaaaacacaagcgtagtacccggttaacagaagtgccagaggatatagaggaaccagcattgctgccttgatagtaccttttaaaccgaagccgtggtacttcccggacaggtagccaacaactactaagtaaagtgctgctacaattggtgagatcattttttaatctccgtgatcaaccgcattttggttgtctttgacattgtggaatcctggccgattatctcttcgatcttcgctaggcgaactaggagtcgttcagccgcagcagagaattcatcagcgtctcgtacttgatccatcaacttttcgtggagtccgttattggtcaatctcattctgcggttagtttcccgcagtattgatacccaaaccgccagacctgttccagttacgagggctgctattaacagcccggagagaatttctagtaccattactttttcttcgccttttcacgtttcaggtcacgttcgaagctctcagcacgacgttcagcaacctgctggtgttctttggcccagcgcgcttcatttttagcgaggttgtaggccgcagcgtttttgttagtaccttcgtacagagcacgaagtgccgggagagacagtttggcaatctggccttcgaacccatccatatccagcaggattaccagtaccgcaaccatttcgtctttggtcagggtgttagcttgttcgtcagcagttttaccagtggtgtaagagatagtgttcttagccataatgatttccgtccgtttcgttaatttatgcgtatattataccgaaattctaactacttagcaagtgaatttttaaactttttaccaatcgatccggtaagcgtaaacttcagaatgaatgtgctcttctaccagcttcttgacctctggccagttcttttgaatttcgtccagaacgtagtcgttcgaagcgtcttcccattcgtcaggagtgcgcatgaaagagttcgcatactctagcacactctctagaacatcggtcaggtaaactatttccccacgattgcagtatgcgtgttgataatcccggcgatcttcattaaacggggagtcgctgagatagtctcccatatgaagaagctcatcggcgaactcctcaaatgccttaacacgagcagacagcggtatgctttcatcacgcatcagcaggttaaaagaagcacgggcggtgttaactgcgtggcggagggattccatatttgcattcagttcgatcattgcgtttttcatatttgcttcctcatcaatttataaagctattatacagaaaaattggctcggaagcaactgaatttaaaatacaaatgctacgagcgcccagattccgcctacaattgctgcaccaattaatgcagctacgatcagaaggccaataagcatcttggccatatcattccccattccagtatacatggttattcctccactaccaatcttctcatgtagtcgttccaccctgcacagaagggagagacaccacggagtagctccgtagactggtgctgcttatagtgatcttctgcagccttagccccgcgtttcttctctgcccttttattaaactcttccagcacaatacgtccttctagagcttctttagcgatagggtactccggccaatcctcctctagaacgatatagttagggaaccctaccttaccgtcggcctcccggcccctaaagataagtgatagactgtcgtttatctcccgaatagcagtgctggttagatacttggcggcatctgactgcttaaatacaatatagcgagattcgagtttcatgatttacctcaggcagtgaatagaatgtcgtccagtagatcgtccattgggcgatctttatggatctcccagaactcttccggttcccaggtttcagtgtccggggcaaccagaaccgagatactcgcgtcatctgtaaacacggagtttccgttgtccagcattgcgacacatttctgcaactcgaaaccaccagcaactacgaatacttcaccttcttccaaatctttgaaaagtttcatgcttcacctattaaataatgtcagcggaaccacagggatcatcacgatttgtggtaaatgtgtataattgacctagaaccggcgacgccacggtcatacgaccgttaaaggtgccacctgtgtccagatagactcggttcttccagcgaatcgggaacggaacaccagtatggccatgaaatacgtagtctactcccactatttcaggcacatcgactgcgcactcctcggagaagctggcgtagcgatcgaagtacggatgcttctccccactacggtgcagattaaacccaacttcctggattacatcacgatcccacagcagtacacccaaacgacgtaaatctggtgtagattcatgttcgtgcacaatatcatcccacaccggtacagttacgtccatacctcgagcctgatagcgcagagggataccagcatgaactaccccgtaacgcttgccacggtgctctactgtcatcatatacggcattttgctgtccatgtcctctgcgatgcctttgagagtatccgtatcgaaaccttccgtgatagtccagctaccaccattatacatccagttggcatagtcgtcttggatcatgaactcatcatggttcccacgaacagagcggaatttcgggttgtacaggaacttcgctagaacctgtaagttcttcgggccacggtcgataagatcccctacgcagaacacgtagtcccgaccttcctcgtatccagcaagtttcagggcatccatcatcatatcgtattcgccatgaatatccccaatgaagaagatattagcattgtcgggcacggtaactgtttcatgaacgttcattaatacctcgtctcttctttatgttgcgtatgttcgctctttgtggtaagatttctgtacgagccatttactttatcgtagaacttgctcttagtaaatccgtcatactcccagaaaataacaattcggttatcagtgacctttgccagctcaaagcctttttctttagcccagcgaatgcaagaatagtccagctcacctactttaatagtaatccctgacagtccctcttctatgttggagactattgcttttatcagttcaggtatctgagcttttttaatactgtatttatgggcacggtttttacaggccatttttgttgcccaccttctgtttacgtattccatcattaacactccacatcgtcgtgttcatagccatagttagtgcaggtgttagcttcatcatcgtccttacagaacgcaacgtagcagtctacaacttcccagaacgcttcgttgatcaaagcattttggtgggttagatctaattcatcccactcttcttcgctctggaagtccgtatgtacgtgagcatcacaacctacagcgcctagagatacgacaataactaactcgtcatctaccatttccacgtaagcctctgcatactcccaggcggcttcattaacaagctgagtctttacttcggggctgagagcttgccactcttcttttgtgtaccccagatcaacgaaggtagtgccgaccgcaaaaccgttattcaggataagatatgcttgcttagtcattgtgtagtcctctctcaattcaatataaatattatatcaaaattttaagcatttagcaagtaataaaaaaccccggtctcgtattgagccggggttaggcattattcttctacgtagtcgataaagtcttggatagctttactaactaccgcagagcgaagcgtggcaccactcagaatgtgatgtgcttcttcacgtccgttctccacatccaccaggactactgcgggtacagtgcgaaggccgaacttacgtagggaatctacgtcatccgtgcgtttttcaacgggcaggttgaactcagcggtgagcttatcaaaaacaggttcaaactgcttacaaggggcacagttagaacctttaaggaatacaatcttcttagacattattaatactctccaatagtgttttcattgtttttacggttgcggtatccaggtctagcttttctccgaaagcttccattacagcttcctgatacggctttttcagacgaccctcaggcactgctacttttttaacatctcctgccttgacttttgccaaaatagtggttaaagttggcatagaaagtttctggccctcaatgttaacgccgagcagttcggttagcgcattgttaaggtcaattcgggtcattttcttaccgttggacataacaccctccgatttcttagcaattttcttaaactccggtgactcacgatcccgcagagctatatttaactcgtagggagctactttaaaatgctcgcacatttgagtgtagaatctgtccgacattttgtatctcctctctcgaatttataaatatataatacgctaaatcgagcagaaagtcaattgaatttttcattaatcgcagtacttgcctcgtcttacgaaaaatagtgtaatggggtagactgagtacatcaacacaggagaagtaagggttaggatagacgtcaccccacctgcatacatcagcggtataaatgctagcgttatagctaggactatcataccgaataacagtgccaaggacaatgagaagcaattctctagacctaaccagagccagcaaaaccctgtccctctctttttctcacatggacagcgaaacacaccaaaaataccaaatacgaaatgtaggagccatctagcaaccctagctaagcgtgttctgcgaaaataaatggcaccgcgtattaaaatccatgttgcggaaaagaatactataccaaattgaaatatcttgagtagcattatagttactaaacttgcaaacataaccacctcctatttgcttgctccatacaaagaaggggagcctaaaagctccccttaatgtcacagtaactctacatgcccgccgtcataagaccctctttggatttcatcacggtagtcgccagagttgttccaatccgctccgaaacgaacggcgatgttcatttcatttgcggcctttttaaatgcaccgacaatagcccaaaatgcttctaagtcgttccagtcaatcttaccattgatatacggagcgaaatcaatggcctttcccgtaacgtgcttagacttgctagggtcttttaaaaatgaggtgccattggcaatattctgggcactctgttctacggtacgtttaccttgaataatggtaaaatcgtggggtgatagttccagagcacgaatagccagagccttaagtttaggatctacagtatcgagctgctggagactacggtttccaaatctgaaactcatattgatctccctagtgatctctgcggtgatgcgcagatttttgccatatagtcattaaacatacccatgtcctcgttttgtagggggtacttctcccacgcgacggcgacatacccagcgtagatgttattaaggttaaaatatgggcacgtgtacacatactcgaagtttgcactcttaaacggcggcaaacccgttccagaccacttcgataaaccttgtttattccttgcgtcgatcgcaaagtttagaccgtctaagtgagctcggtagagcatagacgtcttgtcaactgctttgtcggatacatcggatttatccaactgaacgttgctttcccaagctatgatagtttggtaatcatttatagcctcaggcttgtacttaaccacgaagacggcatcagctcgagtctgtgagaataggatcattgccttctctcgtgccacatttggaaactctagtgtgcgttgtactttaacatcttgtaggaccgccgaagtagagaaagtctttaagtacgacatgacttcactcgtattagctataaagaggtagataactagaccaaccagtaaggttagcaaacgtttaagaagagaagctggatccttcgcttcttgtagtaacagcgatatcaactgtataaatttatccattaagaacctcctctaaccatttataattataccctttattggaggaagttgcaataaaaatttatagttattactcggatcatactttgggacaaatgtcaagtagaatttagataaagaaaaaggccagagcgaaaaagccctggcctacttagttttattgacccgcagccttacgagcttcttgctctcggtgcgcagccatacgatctacacgttcgttgatctctttggaggtcagccaaatgtccttaccaccttctatcatctcggtgatctcttctaaagagaagaaggggtagtacaggtccagcatcatatcctcaaagaatgagttaaactgatcagcatagtgctggatctcgtttttacccttaccataatgtgcgccacgataggtatgacccatcaacataacgtaagggtgcaccagccaaccatgacatgctaggaagattgagcaggcagctgatgctgatggcccaaccagatgtccaatcacggttccctggcagttcatgataaggttgcacaactgaactgctgtatcaacgtatccgccgggactattaatataaagattaagagtgtctccctcttgcatagttgccagagtgactgataggtcgcggtagtagtctacatcgactatcggcccatcgagatgatagtggtaaatattatactctgccttagtcgccaccagggaggcgaagtaattaggagtcttattgccacctttctgctctacgttattaatttgtcccatattgttaccttatataaagagaatcctctcgtcgcaaaacgcgtttacatttttacggaaattttccagtccgtcaaagttatttgtgaccacatcatcaataaactctggtgcaacacctctagcagaggcatgagtagattggatagcgtggatgttgttaggggcgtgaactttaagaatactagagttctgcgcaccggggaagttccgaactagagcggcttcattatcaaaacgaacatcagaaataatactaatgtcagctttggtagcagtgatacgatcgaccacaatatttaaccacaagttctcatccaccagagcgcgtcctaactccgtgccaacaaattctagcattttacgaggggacgtgtataatgggtacagcggggtctcgtgaccccgataaaagtctggagcagtcttagcaaccaacggatatagcgttgacgcttcaaactgaggccaaacgtaagagaaatcggcgtacttgtcgatcccaaaacgcttccagacgttagcagtacgctcaagggcttcctgagtcacccaaaaccactgcttaatctcttttgtcctgcgctctgccagcttttctggcgtgactccaaggattacagccgcgagttcgtaaactggagccgcaaaactgaatttactgatagaatactccggaccgaggacttcccaggcccaaaccttagccatgtcagcaaaggtgtctttgcctgcaccggcatcaccaactaatcctaaaacgtatttcattttgtttccttattgaatggtttgcaacgatattcattaagtgacacgcgataggtacacgttaatgcagtcagattggcaatgtaggtgtagacctgctcattacatttgcccattgtgatccaatcttggtaaggtatgcgaacatacactttcccttcttcgtttatgaactcaaaattaaacgggcaagtctgtaggcttgctggccacggtaggtgttgcggctctatccccgttactgtactacttgggtctggccgttctgcacacccggatgcgatgattgcagccgagagcaggagtccatatttccagttacgcatgaaagtctctcctggaactcattaactttgtcttttgccaccttagtagcaagtttaggtttagcggcaaccacgccctctttggctctagctgcatccagtttattaatacgtccatccagctcttcctggttcttggctaggttggttatgtaggtagtggtgttgcgatctcgatttcgaatctctgtttggagattaccaactgtcttttctagttgttcattacggtttgatagggactgtaaagaactggacatatctgttagcttattggtaatgtaataggcaccaccgaaggtgcctgctgcaattgccagaaacagaattgctccagtcttaccgctccatattcctgaaagaaactttagcatcgaagcccttagcaattaaccgatcacgatcagacgtagattcggtctttggttccccttgacccagcacaccgaagatataggattctagggtctggtgccagcgatacaggtttggatcaatttcctgccacgggaaatcttccgcatggaagttgaaatcagttttaacggtaatgttaaccgttgggtctgtcttagactttgcagcatcccatgccatcgcaatgggcttgttgaaggtctctaggaacgcagaagccgtagcagttgcgttacgcacatgagcgtcgatcttctcaatcgtattcatgtcccaacccatccgcaggtagtatccttggtcttccagtacctcttttactttaactgggtcgaaagtctggatatgcacagcatccgctcctaggccagtgtgataaccatacagccagcgtagtgtaccacaaatcaatactggacgaacttccagagttcccatattaacacctccgtatccaaaggaagtgcggttacgcaagatttcagcgtagaaaataatttgttcgaaatcagcggatacgtttacaacctttttcacctcttcgcgataccatgctctttctgcatcatacatagtaccttgtagatcatatacgtcctttaatttagagataatacgcatctttgttctcctctcatttataaaaccattatacaacattttaagcgagagtgcaagtaatttttaaaaaagaaaagcccaacacctttcgatgctgggcttggatatttagcgatttagcgggtgtttttcaacacaataattattaaagatctgtgcccttttgaggctgtccggtttaggcttagcaaatgggcctttcaaagcgccttgtacaatgaaaatccctttgcaaattctgccgatgatcttacgatccatacagcggatctccgcagcatatttaccactacgaagctcctggagcttgtcgaaggacttcaagacaccttctgcgtctttggcaccgcccctggcgattatggcctcgatatctttacgggtggcgaacttggccagaaactcgaaggctttagctgacattaccttagcgcaatccagaccatgattgatacccactgccatccacgctgctactgccagtagaaataaagtaaacattttgcttcctcagtttgtctttgaattagttaatggtcagcgaccaactcaccacttcgttcatcgcgggcacgactccggataggaacaggaaggtgactcctataacggccctaccgttatacgtgtggattcatgttacacatcatccgagtcttctctacttcccgtcgtgctttgcgacgttcccgccgtagtttgtattcattttcaatgaccttatgaaagtggtcgttaatgttatcctctggtaacatcaggcgaattgttgccaactgctcgatctgaacccgaaggtgggagttaggcatacaaagctcttgcatctccacgaacccggataatcctagagcggtcatagaggctttagcgtatactttgtcctcttttagacttagttcaacggttatccggtagcgagagtcaaacacagtacaccactccgagggtactgccccggctcttgcccagactgaataaggagcttcctcaaaagcgcactcttcattaatccagtctagggtctcttgaagtttggggtgaagattactcatcgctatcatcctcgtcttctacctgacgaccatagcggtccagtgtcacagcgggcttgccataggttttgttcgtgtagatcttagtttccccaaaacgggtttcagatttacgaaacttaccagcttctttagtaatcccattcgttgttacacgaacccgcccattatccgagatctctactttgttacgctctgcggccagagatactccagagtacatcatactgaatacgatgattgctgcaattgaacgcttactcatagtcttcaccttcgttatcttgttcatccacttcaccttcgaggtctggctcgcagtcccggcagatttcctctatttggttctccgccctttcaaaagcaggacaccaccacccacaattcacgcaccgaaagatctccatatcttccgcggtctgccagaagagatcctcgataacaccttcgtgaaggttatacccgttagccaccagctcttcttcgataacattgagagcttcagtttcgcttacacaggaaccttgtacatacccgtgcattaacgggcggataatgctttcaatacttagtttgctcatgaagctctccctatcaatttatgtaactattatatcgaaaaatcgcctacaatgcaactgaatttttcaatactttggcttcggaacgctttcttttgtattcggcagctcctttttcgagttccgaattaaggaagtcaaccatggtatcccacttgcgatttatccagtgacgagtaccataatgcgagaatacctgtacggtatagtctaccggactggcgtctttgacgctataccaggcctcaggactaaactgcttgagatcgtccagctgcggagttggcatatccagagctttttgatggtacagttttgtcaggtcaaatactttctgctggtaacgttcatggtcacgatagtaaccagagagtcgctccactagagattgggctgcttccagattacgagaggttacaacgcaaatacgatccggcaacccctgctccatgaattcatgtactacacaatatcctagatccatattaacagctccagctacacttaggacacgggcaggacagtgcgtgtacgcacatcttgccgttcttatctacaccagtaccatgacatttggtacaggcagcatgtaaacacaccggtcgttgctcttcgactaacttcttaataaacggagcgctttcaaccattttgcacaattcttcatgagagtatccaagacctgtactaatcattttctacctctgcgtttcggagtgggccaggaattagtcttgccgtgagtaacttcctggcgggagctacggggcataaagttattgccaatcgggtgttcgtgttccatttcccgagcgtaggattctaactctagaaagctggcttgggactctcgttccattctttctagatcagcgaagctgggaaatccgccgattccgccgtagccaataagcattattttcggcacctcgacattacgttcttccagtcgtttacgaacaagttctattgcttcccgagcaattttatcgtccattacgttcctccttcggtaagtaatcatgcagctctacataagagatgttctttctttctttatactctggcttaccatacataccgtgcacttctaccactttggcgcgacgaggattattaaacataacgtttcccggtatgaccactacatcacctatttccggggagtatttccaataactaggtacgcggtaaacatatgttctgttactgttggagaacttaattccaacgtggcgagtagttgaagccatgatataaagccttagccgcctgccgcggcatgttaagtttttcagccagttcagaccagaagtctttaccgcttaccatgttatatgctacgatgttcccatcgaaatctttgagacgctcggcctctgcctctaaagctggtcggttcttctcaacttcgagctgaaactcgttcagacgcatgaaattacttttgtcgcctagaaaacggacgtaggctccggctacaccatctatggaagaagcaccacatttacaggtctgcattttgtggtcaaccaactccagggtgtcacggcagcattttacgaaatatacaactttactcataatcattatatccttcaactgtaaaccagcgtttaacttgtgtgaagctcacccaaatgccctcatttgcgtcgctccgtactttgtaccctgccctactatcgtgtagttcaacgaagtagagcttacccggagtgaagtattgaaacttgtgacccccaacaattttatactgaaggccaactccaggtgtgaatcgtaagagactagctttcaccatatttcttctccaaacgtttttcacgcagttcagcctttctcttggccacacgttcacgcagtgtgccgtgttctttctcatagcgcaggtgatgcttgttgaaatcacgcttcatacgaacgttatgccagtattcttggctggcaataaagatcgccgggcgagacagcctaggaacatcgtatagctcgaacatgcgcttcatttctttatattcagcgtagttcataactcgatcgccaggggcaatctgattatcccaaacccacttttcgtgatcccaatccgtatagaacgctcggataacgccaggagttacttcaatttcgtaccacgccgtcttagatacacgatcgtgatacagccctgggcgattaaataccggattacgttctttttctcgccagttatggaacgtaccgtctagtgcttgctccacactgcgtcgtgttgctttgccccagatgtagaaagagtcaacaaggctagaacgaaagactcggataccacgtagagattgcttattcattatttgatccccaatgcgagaagatgattagacagcctatcaagtgcttccagagcagctttgttgttttctctcaggttgctaatagtcgtctggaggctatcaataacaaagtcacggactgctaactctgctgcgattgcggacttactattaagtccttccgcggtcattgcgttgacatgtcgggtataataaccgccagcgaaatccagttcgtcaatagcacgttcggcgtaatgcaattcattcagttcattgagttcgttcattgattactccttatccaccatttcgaggcgttctttgacgtataccagcctgttgtgttgttctttagctaactctgctaatctgtagatatccgccactaactgcattgtatggtcgtccataccttcgggtgggagtgtatctgcatatgcagtacagatagcgataaactcttctgtgttttccattgttactttcatgttggaaacctctctcatcaatttataaatctattatacggcaaaattggcatttttgcaagtgaatttataaagaaaaagcccctcgctcaaagagacaaggggcttttgtttagaggtcaggaggtgcctcagtgttcttttctggttgttgacgatatttaaccgggatcatatcatatagcatttcaatcgatgcaaatgtgaacggtacccgcacattagatggtgtagtcagtatcagcagttgacgcttttcatcgatttctatacagttagacatcttgacgatcctcttctaaggatttttgtgctctcagaacaatctggtttatttgctccagagagtcgaaggaaagttgcaggccatgaccttcatcggtggcctgtatgaataaaactctcttagaggcgtctacgaagacttgaaattcttgttccactttactctccaaaaataattacaggacactggttttctctggctatacgagccacgtaactgtttacgctatgcttaatagccaagctaggctcgtcaaacatgacgcagctgaatcgacgacctatgcgataggtttctagcatgctatacgttgtaattttaacgtgaggttgaagctcattatacttcttctctaagcgtgccatttcccggacaccggatgctacatatactgcttgaatacccttaaatactgcaaactcatatgctgtattaatagcctcaaacgtcttgccagtagctcgtcccggattgactgatagaggccaacgaaggtcaagttctaggaacctgaacagttggttgcaatctatgtacatgctggctccttaaaccaaactatacgaaaacctgtctcgtcctccagagcctgtacaatttgttccagtgccagaaccttatcggacgagaatgtccagagaaactgttggagttcattccaagactcggcctccataatcggaacaccgatttcctggccgaaataattatcagtaccacgaacgtcaatacgaccaccggcataccgtttatcaaacactttgcgagttagttgcccgccatctgcaaaacgattaggctcggttacttccgtatacggaatgcccatacgaatgtaccaattgttggagatcggccccataaaattggtgctataagtgatcatgatcacccctttaaattggcaaaccccaggagactcgaactcctactgcacggttttggagaccggcgtgctgtccagtaacactcggggaatagaattagctaccgtggtagacagatactgtcttaccattctgattcataacgtaggctacctcatcttctttcaggaagatatgctgatcaagaccagcaatagagatgctcttctgcttaggattaaacccaacgcttgaaccatcgtgaatttcttcgccaccgttaggtgacattactttaactgttaacatttgcttctcctatagtttgccatctctggctgttaagtgacgtcctaactattatagagtcgagttccaggcagacgtcggcaccccggactacattggctctagaacagcaaataatttaagagctaaacatactaagacgcagcgcacgtacacgatctacgcaggcttccatctcagctaggagcgagaacactagctctgcatcaaaggttttcattgttgtacctctcaagtagtatcgataaaatggccttaccggctcccagttccttgtttaattccccgaaacgtcaggggacggtcattttaccgaatttggagcgactaggggggaatcgaaccccactcagtaccgcttggaaggcggacgctgtaacccgtacagttagtcgcagaaatggtgccccttgatggaatcgaaccaccgaaggctgcttacaaggcagctgttataccacttaactaaagaggcgaaattggtctccccggtaggatttgaacctacgacccgatgcatccaaggcacccacgctgaccaggctgcgctacggagagttatctgtaaactgcaagttctttcatcttacggatgattaattctttaggagcggaaatccactcattggagcgttcaaaactatccagcaccaatttttcatctcgtctacgatcgaagctaaagaagtaaaactccagggtgtaatctcgtgcaggagagtacgtctggtaagaatttaatcgatctattacgtcaatagcggaacctactttaaaactgtcccaggcagggttagatactaagtaaacatacccggcattcagccccttagcctgattttccttatggtaaaactttagtaggtctctagccacaatttggcagaaatgttttgtatttctacggtatgaactagaacctttcacatgggaggtagtacggaagtactctttattcgtaatattctctactatgaatagtacgttttcctcggtaatatccggagttataaaccccgcatcaataagctcttttagcttattggactcccctttaccatgcttcatatttctaaccctataaaattggatacgggagtaggactcgaacctaccatcacctgtgcggaattacgagaccatttatttacggaatcgaaccgtatctcaacccaagccaggccggcttccccatcagtcgtgccccgtaatttggtacccactcccggactcgaaccgggaaccctgaagtcttaagcctcatgcctctaccagattggaccaagtgggtgttgtttgttaccgaatctccagaccttggaagtagcgagggaacggagagcctacttcaaagctgatgccccagttgagttccactagctctgacttatccaaaagcagatcattgccttcaaagatgtagccgtatacagttgggaacatcgctgctagatcttccatattggagtaagcattatgctcttcacggaattgctcaaactcttcaaagaacttctcaaggaagaactctggtacaatgaacgttacaacatcagtgctgtcatcaatacgatagaccgttgcctggaataagccgacaccgaccaagttgatagcaggagtagtaaagatatccattattaatataccttgattaaagtattgtcgatggtgttcaggaacttaactgccgcatctctattagagaatgtctccagcacgataatgttgttctcaggatcaccgttacgcactcgtatctggtacgatacaatcacttcccagcggaaccataaagctcgtggattatatcgcataagaattttttggttcattaggtaagccctctcattaatttatacaattattatattataaataagagcgtttagcaaatgaatttttcgaactttcgggaaaatgccaccctaagtcaatgccactacttgagacgttataggcaatctatctcaagttgtctgccccattgctttcagtgatttctgcacgcagaaattcttcttgactggaggactttaccacgtcaaacggccggaaatcggtggcttattttatcctgtcacccatcaccggcttgtctgagtttaatcagagagtctgtaacgggctacttgggatttggaagtatcagttggattcgaaccaacgcaccggctaacctagagatcaccagacgtttccaagtctgctcactaacggccagctgctttaccgtgagctttaggactattcagctccataagctattgatactattaatttggtgcaaccggttcgatttgaacgaacgacccctggactttcaaaccagtgctctcaccccgctgagctacagttgcgtaattcatgcctgctcctttgaatcaagaagtccaccccggtctttgggtctttgcagtacatcacgctgctctgatgtttggtggaacttgggagactacgtgttactcccctcacagaccgggattccccgctatccatgatgcttaaccgattagctgaagtcccatagtgtggtagaccgcccgggactcgaacccggaacctatcgcttaaaaggcgagtgctctaaccattgagctagcgatctataattggagcaccatcatggattttaaccatgcttcgagggtttgcaagcctctgcctagtcactcggccaatgatgcattgtttaattagggcgcaccggagttccaccgattgctaacgcttcactgcaacctaagtcgctgttcttaccctaaattggcgggagaggtgagattcgaactcactgtcattcgcttaacaggcgaccgcctataccacttactgcttctctcccaaatagatttaacaaccaaagcgcttttgtccatttaagctacaaggcctttatgccgcctgttgcgtacgcgggattcgaacccggatctctttggttgtcaaaattggtgggggaagatggagtcgaaccacccgagccgcaatggcaacgattttacagaccgctctgctaccacttacagaatattcccccgtatttgaagaagctctcgtgagaacctcttcaaatacctcgtcgaaacgagatatttgctaacttattgtgactagggctgacccttgtgtccgaggatacctctagacggtcatttctcttagcccagagagaaactagctttgggtgtttcggggttactccttctcggctctactgttaacccttattcgaactacataccgagttatgagcgtactcactagtttaaattggcgcggctaacgggattcgaacccgtggctccgacgtgacaggccggtatgttgaccgctgaacaccatagccgcttaatttgttattccggttcgtactccatcagatcgtctgactcacatgtcgggcactcccaatggcattcacttaactcaccgcaatcggaacaaatgtacatttttacttcgttttccatttgcttttcctctttcgtttcaatataaatattatactaaatttcagagtactaggcaaatgaatttttcattaatcgtcttcttcgtcccatgagagggagtgcatgaagatcggtagaactgtaggttctacgtcagacgacgggtagaagtaagtcttaccttgagacaggtcaatgaacgtgggggttctaccctcctgcatgtgttcatcaaccttgtctagggcgtcgtttaacagttcgaagcagtcagtattcgctccgcaaacaacgataaaatccattaacgacccccgttcgggaaaccggaggcaagcaggaagcgaacaacgtcttccagcgacgggccttcgccatcttcttcttccagatggaaaggcaggatagcgtactgcatgtcggctggggctaccggggtgaaggtaggctctgctggagcttccgccatgaacactgcggttccgtcaaccagacgatcgatcgcttcacagacttctagctgttcttcgatcttggcctcgcgttcgcgcatcagagccagtagttcagtgcggtactcttcgatacggcgatctagagactcgatgttattggacaggttatcctgtacaatcatcaggcggactacagcagaatttccattagttggtcgtgtaaacatgatatttcctcgattgattattagataaagtcgccggtagagactaccagtttaatgcttttacggaagatttcgttcataccgtcgtgaaccattactgtcccgaccagttttggaaggtagacttccacatcaatattaccgtatggcatggcgtgctcgtcagtaagtttagtccataactccggctgaagctcgcagttatagaacaccatccattcatgatcaccatcccatccgtcccagttaagaaccagtgcggattcaatacctgttgcagtaacctttgacatttgctaactcctctcgttaatttatgaatctattatagcaattataagagcgtttagcaaatgaatttttgaattatccgctccgaagagcggtaatccaggcttgcagctgttagttacacttggtttgaagttgtctaggacattaactagaggttgatggcctccccgtttctgcaactaacatttcacagcttctcggacgtttgacggccctgaccgaagtctcactgtaaattggtacttgctgctggtttcgaaccagctaccctcgccgtgtaaagacgatgctctcccgattgagctaagcaagtatttggtggtcaatagtggactcgaaccactgtagtctcacgtatgaagcgagtgcataaaccatctctgccaactgaccttatttggtactccgaactggactcgaaccagtgacctaacgattatcggtcgtttgctctaccaactgagctatcgaagcattattgttcctgctggcggacgcagatttcctcgtccgggtgtattttagcgatcctagcgtcttcctcggcttcattgtaggtgtcgtgaaaagccggtgccaagaatacaatctcttttgtgtgggtattaattagcataccttgatagcgagtcatagttacctcaacgtttaccattacgaggtgctccgggacgtttagcagcttctgccattcgtttcttgattttagcgatattctctggtgtttgttctgacttgcgtaagcccgccacattacaccactgatctccgtcccaggaggtgatcaataatactccactacctaaaacacgttctgtgaaagtgattcgcatcatcttctcctagaattggatgctccggcaagattcgaacttgcgatctccagcttatgagactggcgaggacggcctctcctctacggtgcaattggcaggggcaacaagaatcgaacttgtgacctaaggcttcagagacctccgctctacctactgagctataccccaattatgcgcactctgctgagtacaacgttgtgtctagggccagaacataaatgcttgcatttatgggaagcggctagaagagggatgtgacccggagggctaacctcgtcactctcagcagagattttatggtacaccatcgaggaatcgaacctcaaccatagagttcgtagctctatattctatccattaaactaatggtgcagtaatctggagggatatcttggattcgaaccaagatagactcgatccacaatcgaggtcattatccagttatgataatatcccaaatttgagtaccatcgagggctgatcagacctccacaaataaaatgcacatcgcacaccgtatttggttagaccgcgtactgggcataggacactcagtgtactacgtagtcccagcgtacgactcctataatatcaatgatactcaaatttggtggccctaagaaactcttcccactcacaactagttgattacttctggattttcgcccagaaaattctctagaaaggggcaaccgttactcgtcgggccattgtttggcggaaagcgaaggacttgaaccttcatgcccttgcggactcatcattagcagtgatgcgtggctaccgtttcaccagctttccagttgtttggcggagaataaaggaatcgaaccctcaccgtttccgatggcgactgatttcaagtcagcttgctcccatgagcactactctccagttaatataagatgatgcctcgactacaccgggctgtttaagccccgccaggattcgaacctgttaaaacagtgtttccaccagccgtaggtttcactgaacatcaaatttggtagggatggagggggtcgaacccacacggatatttcaccactagaacctaaatctagcgcggctgccaatttcgccacatccccatttgtttggtggaggataacggatttgaaccgttctgattcccgcattgcaagtgcggtgtccactcccagcagacccatcccccaataatttgttaaggcaattaatccggtgcgcgtaataccctgagcaattagccatgcaaggatacccgctcttcacaaatacgatacactctacgcttaccaggcgtttcggagagccactccgctattcttgcaaaccctcagttcaattaccgagcaagctgcaagcgtgttttttggttccggctctgtatcagattaattccttaacaaactatataaatattatatcaatttgttaagcatttagcaactgaatttttcagtaaatttggtactcccgacggggttcgaacccgtgttcccactgtgaaagagtggtgtcctaaccagcttagacgacaggagcattttaaatttggcaagggaaggaggagttgaacctaccgatctcggagtcaaaggccgatgccgtaaccacttggctattccctttcaatataaatattatctcaaattctaaagcatttagcaattgaatttttcaagtattttggtagtgacccggcaacgcaggtcactatgcaaactactcgccgtggtctacacgaatgagcggacaaagtttgtccttcttgtagattcgcatcttttggtagatgttaccgaagcgaagctcttcatcgcgagcattatactctttctgtgctctttcaaaggatttactagcgttccattcctggatccgatcccctatcttagcgcaggcccagccgatcccagctatcgccagcagaatcgctactatcgtagatagtcctgctagacttaaccctacaagcatgtaccagggagtaattcccagctcaaaggtgaggcccaagaacgtagataagatacttcccatccccaaggagaagagtacagcaatagcagttacgccaatctgtagcaggaaataccacactgagtgccaaaataggctacacaaggtgactctgttgtcgttcagccgataggtgaaagacgcggaagagaaattaagccacttgtagaaaaaacctttacgtttaatattcagcatatttagcctattacttgagttgattgattaggaaaacttgtagcgcgataatgaatgcggcataggagtcagagcctttaccaccttcgttctcattaacttcttttagtagggcttcaaaagctgctttgtgacgctcatagtgccctctgactgtcgggccagcatcctctaacatgcctaaaagcatatagtactgggtttgtaattgggcgtccattagtcctcccacacgattttaatcgagagaagacgatttacaggaatgaccagcatagtctcagaccgtttattaagaatttccaggatatccccatcacgatggagcagacgtttaggactgatatctgttactgtggactctaggacgataccactgtcatccacgaaggatacgattgcgtttttagtagacattttagtctcctgttatgaaattggtggctcccggaggattcgaacctgcctaccttccgcttatgaggcgggtgctcatacccaatgagcttgagaacctgagaagggctatttctagcccttagttatttatactgctgcttcatcttccggggtgccttccaccggaggttcttcagtaggggtatcctctaccggagtgtcttcagttggagcatcttcaaccggctcaggatctttcacgaagcctgcttcttcatcggagatcacatacagatcctgaatatcctctgtattgatcatacgagctacgctaccgtctttatagaatacggatttagtaccctcgttgcgagccatgttcgcatcgataaccagctcagtaagaacccctttctttaaatattcaattttgtaagccattttatcctctactttctctttgatttaaagaactattatacaaaatttctgacaaaattgcaagaaaaattttgtagaatcaatctcagtctgcgccctgcgggctttttaccgctgcccactgaatattacgtgtgggcagcgattaaagtggtactccctacaggattcgaacctgtgacccacggtttagaagaccgttgctctatcctctgagctaaggaagcattaataaagtttaagtgttttgacaaccagatcatgaacctgttcagaataccggccaacgctcttatgcagcgactccttaaattctagagtacgtctagcgattagctgcttctgttcaggtgtcagattcggtggtggacgttcataaggtggtgtacgcatgttggtctcctaagtatctttaagaactctcgtgaaagctcttaaagataccgccagtaggtaggggccttcccctgtttaagctatgcggcccttctgtcagacgtatcttccagttatagtcaaggtgactaatataccttgccagatcccggccaacggatatccgtcggctaatgcggtctaggcgagggcacactccaaacaggggcacttctagcctgtgtaagggtgctataaatagtggttatgctttcgctcggggtgactccggtcatgactccattgtcacatgcttacacagggtatacgagcttccgcggagctgtatactcaaccgtgtcccacttaggtctcggagccaccgtttgtacgaacggctatccgaatactctttcccacttagaatcaggcgagatcccacctcgccaaagttcatacgatcatcatgccgtatttaaggactagttttggcacttctggagagccatcttccacgcggtctgttaaaatcacacctccgaattttcgatgtgaagtttggctatctctagccttccagcgtatggtcgcttcgcacctgccactcttacgttcaaatcggtttaggtggtggcaaccctccgaagttccgagtttggttgaggccgtcaggtttcctcgtggtttagctgtttcgttcccgcgagtctcccaagtctttccctgggaggggaggaggtactccagcagcgagtggttcgccaatagaaccatcagttatctagctctttccgaccgcaggattcgaacctgcactttccgcatctggggatagctccccgcgtgcagaagtctaccaattaacttaggacggcagtgttgctacataagtgatttcgacaccccactatggtggcaataaccagcaccagacgctatacacatgtctccaatttgcagcctaggcaggtcagtgtgggagctatacgagtttctcaggctcagctccccacctctccggcaggccacgcaccatgcttcattctggtcgaacaagttaaagtgagattccaccattttctataaatcaggagaagagtttacgagactacgggacagctcccgagttttacaagagatctctaacctacgcccgtccaatacgctccctggccggtatccggactggatgcacgaactttgtcaggtgatcactcttaactcaccgattctattcaacgaatcttaatgctcgacgagtcttacattaaaacaagttcagcgtaatcggcccgctgttctctctaatttatgaaactattatatcaactttttaagcattaggcaactgagattttaatttatagaacacatggttgccaattttacttgttcttttgaagtccttgtcttttgtccagtaaggtttagtatctttactgtgaaagtacaaagctcccttcgtcggatctactggaagatccatatagtaaactagtctagctatctctttagcttgtttccactcttcgtctttacgatcgagtttatgtttctttttaccaacccagctgaactgccctggttgatagactactttacaatatgtggacgggaattttccatagttaacacgatttttcgttacttgtgcaactgcggtcattcctttaactccttcccctctagcttcaaagtacacatttttagctatgcactctatctcatgcgcatcaatctttgcctgcgcatggaagctagtgaggatggagatcattagaatggctgctttcattatttctcctttactctttgattcaagaataatagtatatcaagaaatcagccatttagtcaaatcaaattttcaatttcgattcgatagttttaatacagtacgcttctaccagggcgtcaaacaccggatcatgtttcgacggatagaccccctcaggaatcaggttgtaacgctcgattacgtcgtgtgcgtagatttcagcacaacgtaccaatgctttccagtctcctccgagagcctcgaaatagtcacgcgggttacgggcgctagagatatcccagaatttccacggaacgattgcaggatcagacggagagaagacattagcctgagccgccactgtttcgtaaatagacatatcgaactgtgggccgttgccatagtggcgcagagaacgagtgtcgatgccctgttcgtcgataatgccttcgattacctgtttagcctctacgaatgggcaaatcaggtccatgaacgtatgcttggatacaggtgattcatgggtcggattgcaaactagaacggtagactcaccgtctttagcgttcagggcttcaataatggacagtgacggagcactaccagcacgggcctcattcatccagaatgcaatagttccggcggacactttagcacctagggccaactgctgggcaatgttcggggtgcctaaaacgatatacggatctagcgatagatctttcatcagtacgaaagcgaaagacggcatagcgataaaggtgctcttgcaatctcccggagttcccagagattcgatatcgcaaacagagatccagcggtcttgtaagttttgcatattgtttcctttgttattaaagttgcttctagatgtgttaccacatttagaagccacctccggtggtggcttagtcatatcttcggacacatcccagttttcttccatagacggccagtcagccgcccaatcttcgagttcttcgtagcacgaatccatcagttcccgggagttgaccctagagtaatctagggccgacttatgtgtcgctgcacgattgaaatcgtttttagctacaaaatttcgcattatgccttcttagcgggtttgcgtttttgattacgaggcttgtttgccttgcccgtaaatttaatacctacgccgtaacacagggcgcgaacattctcacggctgtactcgcagccaaagatattcggcttgacgctaccgaaacggccctgggtcttgcgcaggacttctttggtgtccgccttatccggcgtactccagccaacgatcttcgagacgtagccagaggtagaacccttagttaccggcttcttacgacgcggggccggtttgcctacagctgatgctgcttgagtatcagccggatgtttacgcagatgacgctccagacgtgctttgcgattcgcttcagttttgggaaaagttgcaactttggtttctactgcttttttagaggtctgcttagccatgatttatttcctttgttttgattggtttcgttaatttatgaatctattatacgttaatttttagcgtttagcaactgcgttttttcattttcatctacaagctcatcgaagatgatgaactcgtacctgttaccgcccgatgtgcttcgcttgctcttccgagctgatgtactggtacccgcctttgttgtacgctggggcggtacagagtttctttcgctcaatttctttaagagcggctcgttctctttcagccatctcaggatccaggatttcccgtgcctgcggtcttggtggtagacgcgtagagggttccccgattttgacgcttccagaaacgcggcgtagagatcgagctggtactgtggtacgtttgggaacaaatccctcaaatctggtgccattataattcatctccacccctcagagctttccactccgcttcaaagatttgggcttccatacgtgcgattcgcagtttcattactactcgatccacaccaggctccatcaggagcacttcatatttcatttcgctaactaagcggcgtaaattctctaacatcacatatcctccatttctagctcggtcatgcgaacatttagcagattatctgcggcctcattaccttctacaccggagtggcccttaaccttaacgaaagttgggatctcattgtggtttagacgatacttcttgagttcgtcgataatccacttccactggtctaagttcagaggtgtatcaccgtctgccttcttccagcctttacgttcccaaccccaaacccaggactcacaaccattcttaacgtaggttgagtccaaatagattgtcattggtcggccaggatttttgttagaccatagcagagcctctagaactgcttgaagttccatctcgttgttagttgtgttgcgtttgggagcagacttggtgccgatttgctcttcgctggagttgtaaactaccatagcccaagcaccaacattgtctacaccacgagtattaccgcggcaaccaccatcagtataaacatgaaacattatgcgtgcccccaggaaatggtaattgattcagtatcacgttggtcaaacggatgatttacttttacttcatagcccgcgtcctttaggtcttccataatctgagaccgtgcggcgataggcagaccattcaatgcgtaagaatctacttctgttttacctgaagaagctgacccatcaatatttgatataatagatctgcgagctgctataactgccatatcgttagaccttttggctttagctgccattgcttttgcatcagtaaaagacatatttatttcctctctcaaatttatgaatctattatattagaaattcacgtggtttgcaaatgaatttttaatataagtggcccgaaggccaccttagttatagtaatttagctggaggaaccagtaaattactgttatagccccgcttagctggagggttttctttaggtggtttaggggcaaactgacgcattagtgcgtccatgcccttgtactttaccatccctaggataacatctatgtgtaaccccgaggattgaaccagaaacttcagctgagactcctccctttcggagaaggttattttggggcgtctgttaaataatcccataagtcctcacgcagtgaacgggtatgcgatagggtcatgcgacttataccccacgattttaaagtcgtccttagaaacccaggtgagtacgtcctctagggtttttatttccgggttgatctctagacgaggtgccgggaaaggtttgcggtcgaattgaccatgttccatgagaaccttgtactgattctcgtagatgtgcatatttactatacgttgatttgctctgattgcccggttccctgtgatctgggccataagcgcaagaaacgtgtagcattggaccatgttaaaggcctgtcccaataggaagtcattggatctctggaaggagtcgagatacagatttccattgagtagcgagaactgatgggtatgcatgcacggtcgtaagcatccttgatcaaattcgccagggttccagaaggtgagaatctctccgcggtcatcaatgcctcgtcgtaaattctcatagatcttatagagttggtcaaagtgggaaccatccggtcgaagccacgttctgccctgtactccatagactctacccatatcgtcggttccctttctgttagggttgaccagccacgcctcgttttcgttggcgttagcgttccacgtattgcagccgatagcacggaattgctctgcggaatcatatcctcgcagatatccgataagctccatgatggcctgaagggcatacgctttacgagttgtgataagtgggaatttctttccgagtacatcatattcaaagtttgaacctattacggttaaacaacgaacccccgttcgagggttctccagccagacaccttcttcgagaatgcgtttgccttcattaatatagtgaatcacagatagactccttccataacaaaacgatagcgctcattttccccagaagctacatgagttactacagcgtccggaggagtggatgtaagtatcgggtgctccagatacataatgtggtctaggcttggtactgtaccagccttaggataaatagtggagcgatagatcgcatccagacagcccatagttgctagagtttctagcagagctttccctcctatgcagactacctcaacttcattacagaagtcccgaattttggaacccaagtgggtgataaaccgcacattacgaggcgggttttttatcagaattggggataccgaacctactacgtacaccatggatttcttctccagtgcctttttcagtcggggaggggccgttgtgtaggtattatggcccaggataacaacctggtaggtatccaggattctgtagaactgttctagctcctcgggaatggagccccagggaagttccccgtaggcgtccatcgtagccggattaaaaatcccaaaggctccatcaactcgcattgcgtataaagctgtaatcattacaggaactctccaaattcgtcagacagatcgtccgggttagcctgagaggttgcaccaacacgatagttggtaatctgtgcttcttgcggagctacttgctggttcttggtgttcagccaacctttcatccagccaataggatcttccataattaccgggagatcttccggccacggaatgttgattgccataaatgccaggcgtgcgttgtaatacaggtactctaccagcaaatcggcgttcagacccggaatatcttcgccttccgggaaaatataatgcgcccagttaatttctgtctccagaatactgcgcaggatcttcggagcattagcctgagctgctgctacaacatggggaggaaattctccgctctggataatacgcagaacttccatcgccataacggtgtggagcgcttcgtctttcgcgataagctgtaagttcttagcgatacccgtcagaatatcgttctccgccagagcaaaggtacatgcaaacgaagcaaaaaacataatggcttctagagcgtatacagcgtagtagaactctaggatcttctgctgtagttgttcagtcagctcttgaaattcatgtggtgacaaacacatgacatcgtcttcctgagccagctcaattgcctctcgttccttaagccatagatctgctagttcagacatttcatctatcactgttactggaagtgctagtcttgcaaatgcctcatcgttagcttgtacagtggcgataaattctcccggattgggtaggacgttacgaataatattcgagtacgctcgactatggatgttctcaaaataactccactgaattagcataccttcaagctccggccgggatactaatttgttgattgcatcttcgggagcacgcgtaataatagagtccgcttgtgtttgccaagccaagtttagaagagtcttgtttttaatatgttgaggtaggttaggccactgctttttgtcgttttctaatgaaatttcagtttctacccaaaactgagaacgctgtagtaacgctaattcctctagtcgggggtagcggacgttcacgtagtcagcaatccccagctcttggcccaggaatagcctagcttcattgtgatcccactcgcggttaaatactgttgacatactgttctgcctctttatttaaattgtctctatactcgatagcttcagctagattatcaaatctcttgaagtacctagtaccattaatagatttttgcaccacaaatttatctttctgcatagaaatgttagggtgccccgttgtattggtgcttctaaccttttgatttaaggcgtttctcttcttatcgcttttacgtaggttagagtatttattatttgccctattcctgtcctcgtgatctattacatccagccattctcctgtttctaggaaaaatactatttgatgtgctttaagcgtacccctgaactctggacagttcagcttgaaagttatatatccgttagcgtctactgagttaattactttattagcccatcgggtattaaagcctccgggattcctcggtctatctttccagaatagttctccagtctcaggtaggtataggaaatatttattgactatttctaaggtaagttcttttctcgatttcatgtgaatattataacaaaaaatccaacctacttgcaaataaaattttgctttcggttggatcgagcttaattacagagtacaaccaccgctggaacagccttgttctgctgccgaaccaccgttatctacgtcaaagtttgcgtagtagaggttcttaatcccatatttagtggagttaaggagatctttgataatctcagtacccggaataatacctccaggatatttgttaaagtcgtagtacaggttggcactaatagcctgatccgtaaacttctgcagaactgctaaccatttaatgtgctcagtacggtcaatgtcgaacgcatacttataggactgcatggtgtcccaatcgtctaggcccggagctacagtaattactttgttaacgcccgaagtcttgatagttactgcactgcgaggaggctctactgcgttggtaacaccaatcagaacagaactagactctcccggcatacttgcagtcaggacagagttgcgcataccatgagttttgatctcttcacggaggctctcccagtccatttctagacctacggaaaccaggtcatccacagtcttcttgtaagtatcgattaacagcgtaccatcagaagtatgagtgcggtggaaccactcacatgggccaacttcttttgccagacgcacagacgctttgtgaaggaagaacgatgctttctctgcttcacggtggatccagttacgagcctcttcaccttcaaatgccaggccttcagcggccattgcacctgcagcgttcatcaacccaatacctacgttacgacgacgtaaagcagtgtatttcatcgctgggaacgggtaatgctgaatctcgatgatagtatcaacgaacttcaacaggatgtaagagatcttctcccattcttccagagttttgatacgacctagggcgaatccgcctaagttgcacagggatacctctccgtactctgaaacatccattttatccagttcttcgtctgtacggtacagatctactacgtgagggatcgggaacgttggctgtacgatttcaacacaaaggttagacatacgcaccgggtctttgaagcgactattacggttcacttcaccagcatccatagtgtacaggcggccagtttccatacgtacagttttccagaactcaatcagttctgctgcaggaatcaccggagctacaggaagaacttcacccttgaacccacgtttggtaacacccgctagacgtttttcggctgcgatgtatagacgttcaaattctgctacgtcgccagagtcaaatgctgcatatacttctggagcatacaggaagctcatcagtgtgatgttctctttacgcaggaagcgtttcaggagaatactgttaaacttcaggttgtagtccatcttatcgattttcttttcatcaggggaacggttgctcttagcctccattacctgaatgatttccggatcgaagaacgcagtgtaaacagttgcagaaccaccacgagactgctgggtgttcgcttttacggagcggtcgatgtgtcgataatatggcagttttccagagtgtgggaacgcgccttttcgcaccggatcagcaattgatctactctcaagatgatagccgatccctgctcgggcagcgaccattttgaagacgacgtgctctgctgcatcaatggagtccagggtatcagtaccgtcaacaagacagcaagaagcgaagcccctgtcagcgctccgaaggcccacgagcggcggagttgggacgttgattttctgtagcgatagcgcgttataaaggtcgattgcatcgagcatactccagtgaggttgagaaagcattgccattgccatacccatgtaggcaaactgcggagtttcatagatctcttccgtatagatattacgtctagagtatttatccatgaactgcttcagaccggcattagtgaacagttcgtcacggctgtggtcgataacttcgtttagagcttcaaactggtcgtcagagatccagccgctcatatcttcccatgctcccagctctaccatgtggtcgtggaagaaacgcagagatggcggggtgtaagaatcaaacagattcttacgtagttgtgctaaacgcagctctagggcgaatcggtcgtaacgatgatcacgctcgatcattgattcagcagacttaatgagcattgtttgcagatcgtctgagtgtacatcacctttgggcaggttcttaactgcggctaccgctaccggagaccacggaacatcgcttcgaattccgatgtattttgcccagtcattcagcttctgggccatgaacggttcttttgtaccgtcacgcttgataacgtattcaatacgttgggtcattggtaactccttttggaagttgtcaggatttaaaagatattctactttgttttcggccattttgcaaatgagattttacacgttaatcgtgtctggcgaattcgccatgtatttggtttcgtagagatatagcgtattcgttagcttcttccggggtgtcgaagccgtatttatcaaaacgcttattattcatatatacttgtactctccacttattgccatgcttggatactcccttgtacccagaggtattattacagtatgaagacttattagccctattttgggccaatgtagacggccttagatttgagggaacattattaagtgtgttacgatccttatgatccacttccccggattcaggtaattccccataatacataatgtatactatgttgtgtacttgatatctttggtagtttatacaaacctgtaagtagttattagcttttccagtcacttccttgagcttacctgacttttgttttctatataatttaccagaggattcgtctaggtgaaagagggcgtctagctcctctttgctgggatatttgatttttgtcattgaaacaaccaaaatttagagaataaaaacaggcaacccctttcgaggctgcctgtgtgtcggtctactttaataaaagtgtaattttttcattcgactaactaactctttagtaccgaggggttggttaggaaactcgtttgctatcttgaaagcggcatggtgtcgccgctcatcctcaggatagttagcattgtatttattgactgttgccagggatactggatgcaccttcgttttacgagtgcggaagttgttcagtgtaaatacgttgttcatacgcgctcctagagttagaggtcaggacgttcgtcgtgagaagtgataccttcaccgaagcctacaaagccccagttttcttcagaggtaataccctcaccataaccaatgatcagttcagtaaccatattagattcccatatcgttaaagattgcctggaatgctttggattcagcggaacgcacgttatcatgcaactctactaaggagaatggcacatgttcgtactgatcgtagatatccatgatcagttgcagaccagaatcggatttaatgtctttctgcgctacgtcgccacagattactaatttgcaatcctgacctacgcgggttagaatacacttcattgcttctacggagatattttgagcttcgtcaacaattacataagaattgttgaaggtacgaccgcgtgcatgttcgatagcaaggtattggattgccttgcgttcaaccagcccctgataagaacgttcccctaaggcccacttaaagccatcggcgattggttctaaccacggtgccatcttctcgttcagatctcctggtagcatccctagggatttaccaagaggttcgttcggacggactaggatgaacttctcgtacacagaaccaggcgttgctaactcttgagcagcgagaacagatgggataaacgttttacccgtacctgcttctccgataccaactgttaccgtaaagttacggatagtgctgatgtagtgtttttgctcagcgttcttcggcttgagttcttttgcggttggttgaaaacgttcccgtgcttcaaaatcaacggggatgacgttttcgtgacgttcacgttttgcgctaccgttacggcgcgactccttacgacgtgctgcttttctcattgcgatctccttagaggtctacagagggtcaaatttcgaccatgtttatcaatttagaataccagtataccaagttttgccgtggattgcaactgaaattttctagaatgatacggaggacatatcctttcctttattcgcgcgatgcgcgggcgcacacgaataatgtaaaatggggagataagcaaataaaattttccggtttttattgttttgatgatccagatcaagttactgttgattataataaaatagggttgacatagttgtgtctatttgatataatatatgcctaactggaggaatatatgaacgaactagacctgattgataatatctatagtatcctcgataacgagggtgaagaagaccttatgtttaataacgccaataaagcaagcgagcagtttcctacacagagggacatgatagctggagaggtttctaaatatgtggtagcacaggagcttccggcatatctcttggcggcgcataatagaggagagatacacattcacgatatggactaccgagcacaggggtatactaactgctgcctggtagatttagcggggatgttcaagaacgggactaaaatcggtggggcagagattgaaactccaaaatctatctctactgcagctgcggtaactgcccaagttattgcccaggtaagctcgtgtcagtatgggggtacgtctatcgatcgtattgacgaggtctttgccccgtatgtccgtaagtcctacgataagcacttagctattggccagcgttggctgcacgatagtaagaaggcagcagtgtatgctactgagatgacagaaagagaagtatatgatgcttgccaggggctagagtatgaagttaacaccctattcaactctaatggtcagcagccgtttgttacatttgggttcggcctaggggaatcctgggaggcacgtatgttgcagaaagctatgctggaagttcgtatacgggggcttggtgcctcaggtcatactgctgtatttcctaaacttattttcgcagttaaggaagggctcaataagtccccaagtgatcctaactacgatatcaaacagctggcgctcatctgcacttccaagagaatgtacccggattacgtgagctatgaaagagtaacggctgttacaggtgattttaaattccctatgggttgtcgatccttcctttcggctattgagtccggggagactgcggggcgtaataacctgggggttgtgtctattaacctaccgctaattgccgtagagtctgagggatgcttcgataagttttggagaatactagatgagtacatagataaagcgatggctgctcacgattgggctattgagcggctgaagcgcgtgcgagctaaacaggcaccaattctctatatgcacggagcttttggggtaagattgaaagctaatgatcttgtatggcccatctttgagggcagggcatcagtgtccttgggatatatcggtattaacgagctgattgaggtaatgtttgaagatgccgaccctatgtccccacctgcgattgaatttgctgtacaggtcctcaaccacatgaaagaccgttgcaacaaaaaagctgaggaaactaatcttgggttcagcctttatgctactcctagtgagtctctgtgcaatagattcaacactaaaattgctgaacagtatccggagtatgactggctaacggataagggctacctgactaatagccaccacctggatgttcgcacaaaagttgcccctaacgtgaagtttgactatgaagctaactttactaccatcgccaatggtggtaacatatccttcgtggaacttccggagatgcgtaaatttatctctgcactagagtgggttgttgactatggattaagtaagtcccactacataggggtcaacattccagttgatgaatgtgaggaatgtgggtacctaggggagtccgtatccggggagcacggttttgtatgccctcagtgtgggtcggggaatatctcagttacccgtcgtgtttgtgggtacctaggtagtcctggtagtagaccctttaaccctggtaagcaacaggaagtaatgcaaagggtcaaacacatgaatttgaaataaatcacttgctaaatacctccgtttttgataagatagttgtaattgagaaacggaggatttatgaaaatccataaaactgatgaaaagcgtatctactttatgatggactctggagcatacggatctatttcccgagaagacgtggtaaaacttctgcgatgccgtaaccacttgtggaaagataaagtcgatcccagaacctctgagtgcttgtccgaaaaggctgagcagttgcggaaagaagaaatgagaaactatatggagttcctgtaatgcgtagattgattatcgtaagtggtgctggattgagtgctgatagtggagtgccaacgttccgtaagggtgccatcactcccctgtgggataaatacaaactaaccgaagtatgcaatattcaggcgttcgataaggggtttcactatctgaacgaccctatgcccccgttagaagccctttctgagggatctgatgatgagcctagccgtaacctgtatgaactaacccatgagttctacaacatgcggaggcaggagctgggtacggtggagcctaacattgctcacttgagaattgctgagtggtatgagcgcttccctggtcaagtcgttaactttactactaacgtggatgatctgctagagcgtgctggcattccccatgatgatgtgatccatgctcatggctaccttacggagataatgtatcgccgtggtaaagatgtgatcgtagaggatatcggatatactgcggttgattaccgtaagtatgagtgggttaagcctgcaattacgttcttcggggaaaccgctccgtggtatatggggcagatcaacctgtttgataccctgacaacccaggatctggtaatcgttgttggtgccagtaaccaagtaatcgattttaattgggagctatttccggcccatagtcgaggtactaaagtgtgggtagtaaacaacggtattaactacctggagcagagtttgtacgaagaacgcgggatccccgtttggtatgatactgctgccaatgtatttagcaacaaacatttcataggtcaagttgaggcttggctggaggagaaaatttatgtaccatcccgatgatatcctgttatggcccaacggtagttggtgttatcgcagtgatgtacaagatatgagtcacctatcggacgactatcaggttttacgagcggactctgagcagtggcacgaattcatccaaatgggggaagaatatgctggtcaatgaaaaggttgttaatcaaggggttgggctagttccctgggctgaaattcctctggacgtaaaagagtctcttctggaccatcttcgtgtgtggtgcgataatatggaggtctacttcgattatgacaacatgcacctggggctatgggttcctatggacgaagatcaagatgaagtcctagactggggcgatctgactgagatggggctggtatttgcgctaggctacgcgtgtctgctgcgtgagtcctatatcccggttggggttacaggtgtttcagcaggtatttgggtcggacgtaatgaagattattatgctccggaaaatattaacggttggatccaggtgctacgtcgcttcggtttccaagttgaagggttaactaaatgagtattcctaaaatggaacgtatctcctgggcggatatccccaaggaattgattgatgtagcagagaatctgctgcgagccgcgttgagggacgaggagctttgcttcatcatccagcatgacgtgtgtgtcggcttgtccaaaggcagtttggcccaggattatgagatcctctttgattgggatgacctctcggatctggggctaatggttctggtgaacaacgttgtgttccacccctctaattttgcagcattccgtgaaccaggggcgggtatttctccggggttcttggtagctgacgagccttggacgtatgctccagaggttcttcgtgaaggcaaacaaaatgcctcttctaactcaattaatattatgggttggaatgcctagttgaacacttagaccaggggattatcctctggtcttttctatgcttaaacccagttacctaccacgtatttaaatattttacttgcaatctcgccacgatttttatataatatattcataggttgagagaaatgatgtgagttacaaaactgacataattcctctcattcacttccgagcatacagaacagtccggctgctacatgcttggttgggtttggcttattggaaaattgattccgaacggaattatagataattgatctagaatgcgggtaagagaggttggcatcgcgaggctctcagatatttgttcgttagtcatgtggagcaaatagcaccgcggtctgaaatgaccaagaagtgaagctgtaagtagcaacgtacctctgcgcaatagcgacgaataggggtcaaccacatggagcttagcggcgattacatgctgtgtgggagttgtgcgaagcggccagttctagcaatgaggaagtgaccacccctccatctataaggaaatttgttgagtcagtggacttttaagctgttctatccttgatagttcgagatcgctttattcttcaacataggagaaaacgtaatgttttctattctagaaggacacgcgggtttttcccgcgatcccgcttccggaaactggaaggaagtgaagacaactgattacctttttgcgaaggagttttctaacgagcatccagaaggtaagccagcctcaatgccctacaaatttaacgtagtggatacggttgaccccaaaaatcttaatgaagcgtatgagctgatggttcagctcactcaagacccacatctcgtagcagtacgaggtacatgcttagttgcagagaaggccgtgcgtcgtaaacgtactaacttcaaaatcgaccataagagcaatattattgctatggacgtcgatggaatctctgataccggaggatgcgacaggtttgacattgtgggtatgggacgtcatgtcattaagttattaaatagcatcagcgaggacatgttcccgcttaacgcagggtttattgcccatgcgtcgtcttcggctggaattaagccagggattcgtatgcacatgctattagagagtaatattcctgttactcagggtcagttaaagtttctatttacgtccctcaatgatagctctcggcagaagtatggttttgatattgccgacttagcttattattcatctgtacagctacactatttcgctgacccgattttccgggatcagtttaccgatccgtttaaagcggagggtaagccacgtctggttaaagttaacggtgctaggattgaactgcccaatactatgccagattatgaagccactcgtggggaatttaaagaagaattcttatccctgctcaatcagattaagggcaagcgtgtagcctctgaaaaagtggaacaaaccattgcagagctggaagaagcagaggatggggtttatctgcgtattattcctaaactgtaccacagagcgctagaggacggtgttgatttcgcatggcttgagaaagaaattacctcagctctgtccgattatatcaacacgaaggacaactcccgtagtcttcaggattacttcaataacggacgtaagcaggcgttaaaagcgtttgtgaacaactctatgcgagatattcctgagtcgaatgttaaaggagttcctgtacacaagttgacctctgatagccccgatgggatgaactatttgaagatcaaccgtccaccgccggaaggtcatttaacgtttattaaggcgtctctaggtactggtaaaaccaccgcagtgacgaagtggctagaacgtgatcagctgaaaggtaacttccttgcagttacgaacacacgtgccctggtttcatctaacgccaagaagtttgaagccggacagtatgataagtccgtagatatgttaaacttcaaacgcggtgcgattgatcgtatgtctactactattcactcaatccacaagtttaaaaactttgttgggcagatcgatgttatctttatcgatgagtgcgacgcagttatgaatgacctgttattcgctccagttgttaagcaacgtcgtgagtgtatctcagttcttcgtgaaattctgctatctgcaaaagtagttatcctgtctgacggggatatcagtgcggaaaccattgaggcatatggatctctcatagattttgacaagccggtctcttattataaacatcatcgtaagatgttgtctgatgctcaggcatatgagttcccggatgaatccagtatttgggttgctctccaaacgtccctagagatgggggagaaatctattctggtatccgactgcgggccggatgagttaaacgagaaaggcctgacgttaagaaacaatacaggtgcgattgttaaagagattcactcaaactctacatctgatatagatattcgtcgtattttggactatacaacgaatgagctgattgaacagcagattgattgcctgctatgtagtccgtcagtaacgagcggtgttgacttcaactacttcgataacgtgtttgttatcactcgtaccgctaaccaggcgccgaacatgcgcttccaggcaatcaggcgcgaccgaggagctaagaatatcttctatttcatcgataagtccaccagcggattctctgcgggttcggagcagtataacatcgatgagggttggctagaattagcccagcagctgtatgttaaacgtcgtgagctagagtcccgtaattttatcagcacattacgatactatctgctggatcaaggagcaactatcgatatcttcagcgaaagctggggtaagattgatagctcagccgcagagtatactgccgagcgagtttctgctattttgagcagtaccccggattggtgtgcaccccgtcatgcggacgcatatgaagccaagctaatgttggtcaagtatttccacctggactctatcaagagtatcacacaggaacatgcggagatgtggattagtaagaaaccacacaaacgggcggagttcttccataaacttcaagatatattctggaaggatattaagaagtgttctaacgtgacgattagtccgtttattgaagctctaaagaaacacaagaaggatttctttattaggacaggacagtctgccaaccctaaatatgcccgtatgtacctaacccaaatgggtattaataaggaaatggagacggagcagatcgtagactggtatcgaacctactgctctatcgagggtatctccgtaccgtatgagttcatgacggatgaggagaaggcgctggccgatgaagcgcaaaacgaacttggagtacgtaatgagcaagcgtgatgctcgctgggagacaaggaagtttcctaaatgcgatacgaaaacacggaaagctaaagagatagagttgtgtagggtaatacccattcgtttagcacagatgccaaatatctatgattggctagaggctcagcgaaagacacgcctttctatacgcatcaacatggaactcaacatggggtacaagagcctatctgaattcatgcacgttactttcgaccctacgttctatgaaaatcgcgattgcttagaagctaaatctgtattataatagtttcataaattcgagagaggataaagaacatggcaatccgcaaaaaacttcatgcgaatagcatcccggacgaaaagtttaaggaagcgattcagtggctagaagatggcaagaccaagaaaggcgcttgcgaaatcctcggagtagcatccaactccacgatggagcgtttgatcgaggaatggaaagataaccagcgtgtttctgctgaaatgcgtaaaaagaaacgtggtactaaaatcgaaggggctgagctggccaacgttatcgattcgtatctgtccggtgatagttttgaagcaatcgccgagcgtttctaccgttctgcaaatatgatccgaatggttctgtctgctcacggtgctctgcttcgtgttaatggtgaggttgacccactcttcccgccagcgattccagaagaatcaatgaaagaggtatttgaagtaggcgaacacgtttgggttccaggatatcagtgtatcggcgaagttaaaaaagctctggacaatccggtaggtgcatatcgtgtttacctgctatccgaagcccgtcaacagtacgttaactatatgtattgggatctggcgtctgttgagcatctggtagcacttggcgtcgatatcaaatccctgggattcaagtggggcaaagaagacgtagctgaactggttaataacgctgttaaagcagccctgaaattagaaaagagaggcaaaggtgagtaaatatcaactcttgaacctatttcagatttattccgaaggtgctacagctatccgggatctgcattatgcagttcccatggacgaagcggaagataatggctggcttaccaaatacgatcgtggtttgctgaagatgtatcgtttgtcccccaatggtttggtagctgttaaccaaatcctagaaaattctgtttgctttgcagctcagtaacttgttataatattctcatagtttgaaacaaaacttaaaaactctttttaacaataaataaggaagtaataaatatgtctactccaactcaatggtctcctgaactcgaagctgaactgacttctgcctacgtcgccaaaatcgaactcttcccggaagatgagcgtcctggtgtctctatggagatcgtagctgagatcgctaaagagcacggtgtttcccctaacggccttcgtatgaagctgtccaaagctggcgtatacgtcaagaaagaagctggtaagtctaccgctaaaactggtggtgatgctcctaaagctggcggacgtacttctaagtctgatgctcaggctgaattgcgcgctgcatttaacgacgctggactggaagatggcttcctggacgaatcgatcgttgacaaactgaccggtaaagctgctgctcacctggctgaagctatccgtaaaatcactaaataagagggtattgcaatgaataaagcacaagtcgtagctatctgtgagaaacacggtgagttttgcatgcaatacaccaaactgcgtaccaaaggggtgacttacctctacggtacgactgagttcgatcctaagcaagataaatatctggccgagcgaatcgtccgtgaaggcctggaacccgctgacaaagatcatatcctggtctttagccgctctagcgataaattccgctatattccgattgcgaatattaagcgcatcaccagcctcaaccaagaacttgatcgagctactccagtaggtcgttaagacgcaatcagccccttcgggggctttttgtttatctgagaacaataaaaatgaatcaaaacatttgtcaggattacgaaggacatatcgatgatcagtcccacgttatctttgaagatgaagggcgacagattcgtatgactgtctcggagtttagaggcaatttatactttggtttccgattgtggttactggatattgaagataactggttccctactaaatcaggtttctcgttcccttacacgttagaaatgactagcacgctgttccgagcatttactaaaatactaagcaattcagaggttcttcatgaagtttaccgtgaatctcaaaagacccaagccagtgacgactaagttgctggctttttctttaaaatctcaattgcttagtgttttaaaccttgatataatattctcatagtttgaaggagatctttatgaaagatcatgaaattgctcagttagtcaataagctgaccgaagctgctaagacgtatgctcatacgcagcaattaagagcacacatgtctagaattgttaacgaggcattaaagaatgcaaaagataacacttaacgcatactccagcccgccacttcagggtcaggagctagtcctaacctggttagagaaagagaagggcaaacctgtagtacggacaatgtcaggcttccagatgttaggcatgtggtacgagaagaacgtattggtatgtgaactgtatagtccaaaatctaatcgtagggtaatgtccaccttccaggcggtatgcgaaaacttttactgggaaggaaagactcagatgctgttcgattactacgaggccaaataatgcaacacgttaaagaatttatcaagctgtgccaagacgcatactacaaaggcatgtcgattatctccgacgaagagtatgatgccttaatccgtcgtttcccgctagaggaagaaattggccctaaaggtgatgtacctcacctattccgtatgttctccctgcagaaagtgtacccaggccgcggcgaagaagtacccttccagggcattgaaacgccgaagctcgatggctgtgctatttcacttctgtatatcgatggaaagttcgtttctgcgttaactcgtggtaacggtatcctagggaatgatgtaactcataatgtgaagttactgaacatacctaaacagatctctcaaaagaccccggtgcagattactggcgaagtacacatcaccaaagaagttgagaacatgcgtaactttgcttctggtgctattaacctgaaggattctggagagtttctctcccgtattgcagaaggtggcctgatgttcacggcatatagtattcagtgtgaaaccggcaaagttggcctgaccgctactttctgtggggatatgcacatccttcagggtgatggttttgttacctgtctggatatctccagtcgagtagattggttccctacggacggcgttgtggttcgtatggacgggaacaaccagtttaatgcagcaggttggactaacaagttccctcgtggtgcgtacgccatcaaagaagacgatgaaggcgaggttactacgctagaacaggtagaatggcaagttggggcttccggtaaggttactcctgttggttacttcaccccggtagtcatcgacgacgctgtcatctcaaaagctaccctgaataacgttggctatatcactgcccttgacctagaaatcggttgccagattcgtgtaattcgtagtggtggggttatccctcgcatcgtagaacgcgtttacgagtaacacttgattcaatagatacaccgtgatgattttttaaagtagttattgacattttcatcgccagggtgtatactattatcattcagttgagggaaagaaatatttggtgagagactgagctaaattctgaaaaatttcgattgcttagtcctgattttcttgctataatatttatataaattgatgaggaagaaaatcaatgaaaattgaaattccactgaattgcccctcttgtggttcgaaactggacttagttaacgatcagttgttctgccgtaacaagtctatgtgtccagctcaaagcagtaaattaatagagaacttctgctcaaagatgaagttaaagggttttggcccacagacgattgctaaactggaaatcacgaaagtttcagaactctttttcctgactaaagaagatttagtcagagctgtaggtgataaagtcgccacgaaacttgagctagagttggaaactaagctgagacaagatgttgactttggttcggttcttggatctcttagtatccctcttatcggtgaagttgctgctaagaaattatcccagctttacaacgatttccaatctgtgaaagcggaaggtaaagctggagaaaacttagcttcgtggaagaatacaccggcaggacaggacgtaattaatctaccatggaaattcagtggggcgcgggaaactcaagttaccccggcgactgaatccaacggagttgttctttgcattactggtaagctcaacgacttcaaaaatcgtgctgacgctaccaaatatctggaaagtcttgggtatacggtgaaaacttccgttactaaggctgtaaactacttaatctgcgaagatgaaaccaagatcggttcttcttcatacaaaaaagcacaatcgctgggcatcgaagtcttgacgattaaaattctactggagaataaataaaaatggctaaattaacctggaacgaagaaatcactgcatccctgaccgctaaagctaacgctctgaacgcgaccgttatctctcaggaagctgttgctaacatcgctgctgaactggctgctgaaactggtaaagaagttaccgctcgttcggttggttctaaactgcgtaaagaaggcttcgaagtgcagaaagcatccgacgtaaccaaatctccgtggactccgggtcaggaagatgaactggttgcattcctgaacgatcatccgggtcagtatacctacgctgaaatcgctgctgctgtagttggtggtgcttataccgctaaacaagtacagggtaaaatcctgagcctggaactgactgcggctgttaagccgaccgaaaaggccgctgctgtacgtagctttagcccggatcaggaagctgctttcattaacgccgttgccagtggcgcgtccgttgaagcaatcgctgctcagttcgaacgtaccgttaagcagatccgaggtaaagctctgagcctgctgcgtgaaggccgtatcgaagctatgccggttcaggaagtctctaatgctaaggcacgtgaagacgttctggaaggtctgaatatcgccgatatgaccgttgctgagatcgcagaagcaactggtaaatccgagcgtggtgttaagtctatgctgagccgccgtggtatctctgctaaggatcacgatggtgtcgctaagcgcgctaaacttgacgctaaatccgccaagtaattgatttgacctgaggggagaggaattttgttcctctcccctttttcgtttaagtagacgctaacgcggcgtagagagtatcttatgtataacgtccaagcagtagttttgaaaatgctcctagcctctgatcaaaagcaggtggccctagagacattctctagactgcgcaaagatcacttcaatgacgcatttaccgcgatctaccaagctgtccagaattattacaaaaagcataacggaatgccttcgttagatgctctgatgctagagtctaacagaaacgcaaggttgtctcaagcactaactgttttagcaaacactcagattccagacgttgacatatcgcatgcgattcatgtcctagagtcggaatacacacaggatctattcctgaatctgctagaaactgatgtgttgcaggacattaccatactggatcagggagaattacttgatcgagtagcggctctgcacatgaagctagaggaacgagtaacaacgactggtaaggtcttcaacgccgatactatgcgtgttttcaagagaaaagaagactccatgttaaatcttatctctctcggcatctcaaacgaatttgatgctcaacttggcggaattgccagaaaagaaacactgctactcggtggatggcgtggtacaggtaaatcaatcatctgttctaacattcaagtagcccagtattacaacggggatatcgccccatatttctccatcgaaatgccagagaatgaggtctttagacgtaacctagccattatggctggtgtttcagctaaggctatgcgcaatgactccttacaaggtattgaactcaacaaacttgcgaagactcgtgcaaaaatgttcgaaggcggtctggaagtatataacgattttgtatcccgttatacgctcaacgagatgagtgacttccatgacatggagactatgctaatgcaggaaagacccctgcacactccgatgatcatcgtgtatgatccggaacttagtacagcaaccatcgatgttgaactaactaagctaacctccaagtatggggacaaagtaacaatcgccctgttagactatatcaaccaggtacgtttgccggatacgaagacattagatatgtatgattggaagcagcagatggttgtgtcctctacgttcaagtctacgtgccaaaagcataacgttgctggtgtagctccttaccagattgaccaacagggtaatgcccgtatggcaagaggtattctcgattcctgtgatatggctgcaaacctaaatgccgctaaacagaacgaggggcatgacggtgcaatcaagtttgacttcgtaaaaactcgtaactccgagggtatgacattcatgccgaagatcaactggaactcattgcgtatggatcagacttctgaccttaagctagaggacattcgtcagatggaagcagagtttgttatcccacttgaaagcgataaaccgaaagacaaaccaaaaaggaaaaaggcttcggatgaggatactaatcccaccggagaatcctcaagagacttatgagtagaataaccgagcttttagatctcaaagggattgaatacagagatacgggtggggacatcctcatccgctgtctcaatcctgatcatgaggatgctcatcctagtttgcgtgttgaccccgattccggggtttttcactgcctaagctgcggatttggtcgtggtatgccaagcatctttcattacttcaatgaagaacagtacaggacgtcgcctagactcctgagagttcgcagaatgattagtgacctccgaactgagggccgcagtctagaaattccagaatcagccatgatattcgatcaagactttcgtggtatcaaagcagagactttcaagaaatactttgcattccaacaaacagaggactgggaaggtcgtgtagtgtttcctattacggatgccgtagggagaaacttattcttcttaggccgtaatatggatagctctgcccctccaaaatatatgatcagacctaaaaaggtctccccaccaatcttccctgttcgctataataccccagccctaatcctagtcgaaggtatattcgacatgttgaatctagaagataaaggctgccataacgtttcctgttgttttggtactcaccagttctcgctagataacattgcagataaattcatgccgttccaaatcgcaggtacgactcacgtagtcatcatattggacaatgataagtctggtaacgaggcagctaagaagttggccaaattaatccgtgataagactagaattataccaattataggtaacttcttgcttccagagggcaaagaccctggagacctagatgctgaagaagtcgaccaactcatcagaaacgtagaaatcttgattgctgaacatgtcaagatttgatataataattgggtaagtttgagaagaaacactgacgttttacttgcttacctaataggagaaatcaatgaaaatcgcagttgtagacaaatcaccaaataacgtccgctatcagaaacacttcgaactctttgaccatgaggttgagaccttcttcatggctagtgagaaagtaaccgggcgactgctcaagaaacatatcactatcggaacaccggagaacccgttcaatccggaagattttgattacgttattctggtaggtgcagacccgttcttgaagtttgcagctaagaaaggcatttccgattactcaggtaaacgtgttgagcacgatgggtacgctaactggattgcaagtatcagtccggcccagctccactttaagccggaaatgaagcctgtatttgaagccacagtagagagcattcatgccattctcaatggtcgtgaaaaacgctccaaggcaggtgattaccgcccgattcagtgcccggatgaagccgaagcgtatgtgaagatggtgtataccatgtgtcctggcatgatcgcatatgactccgaaaccagcgcgctgtactgccgagatggttacatgctggggatctcaatctcccaccaagagtatcagggcgtgtatattgatgcagacgtcatcacagaaaataccgtctattacttacagaagctgttcgatagcccggaacatggcgttgtgttccataacttgaagtttgatatgcacttctactgctatcacttaggtttatcatttgataaggcagcagaagagaaacgcctccacgataccatgctgatgcactacgccctagatgaacgacgtggtacacacggtttgaaatctttggcgatgaagtataccgatatgggggactacgattttgaactcgaccagttcaaggagacgtattgcaagacgcataagatcaagaaagaggatttctcgtatgatctcattccgtttgatatcatgtggccttacgcagcaaaggataccgatgcaacactgcgtctatccaatttcttcctgccaaaagtcgaagctaaccctcgactgaagtctctgtattatgatgtactgatgccgggatgtgtattcctacagcgcatggaagaccgtggtgtaccgatctccaaagatcgtctgaaagaggctcaggttcagttaatgactgcgctacagcttgcaaaagctaagctgtatgagtatccagaagttcgtaagctagaggaagatcagggctcagtatttaacgcagcctctgttgtacagcttcgtaagctcctgttcgattatgttggcttaaccccaactggtatcatgacagataccggtgcagattccactggcgcagatgccctgaaagagctttcagaccaacatccgatagctaagactctgctagagattcgtaagatctccaagctgctctcgacgtatatcgagaagatgctgatcagtattgatgctgacggttgcattcgtactggattccatatccatatgactacatccggtcgtctgagttcgtctggtaagctgaaccttcaacagttacctcgtgatgagtctgttattaaaggttgtattgttgcccctatcggttatcgcattatcgcatgggacttaacaactgctgagatctactatgccgctgtactgtctggtgacattaacatgcagcaagtgtttatcaacatgcagaacgacccggaaaactactcggacttccacggttcgattgcacacatggtgtttgctctgccgtgtaaaccgactgaggttaaaaagctgtatcctgcactgcgtcaggctgcaaaagcgatttcgtttggtattctttacggttctggcccagctaaagtagcagcatcagtaaacgaagctctcctagaagagcacatgaagactggtaaaccgtacaccgaatgtaccaccggtgatgcgaaagagtatatcgaaacctactttggccgattccctcagcttaagaaatggatcgataaatctcatgcccagatccagactaacggcttcatctacagccactttggccgtaagcgtcgtctgcacaacattaactccgaagaccgtggtgtacagggtgaagaactgcgttctggtttcaacgccatcattcagtctgcatcttctgatagtctcctgctaggtgctatcgataccgataatgagattcgctccctgggtctgcaggacgaaatgaagattatcatgctggttcacgactccgtggttgccattgttcgtgaggatttagttgatcagtacaacgagatgctaatccgtaacattcaggtagaccgtggtatcagtatcccaggctgtccgattggtatcgactctgactcagaagctggcggttctcgtgattactcctgtggtaaaatcaagaaacagcgtccttctgttgcttgcattgaggacaaggagtttgaggagaaagtacgtagtattatcggtatggaggacttcgattacgctgctattgcggctaacgatgaaaaccaccctgatcacgataagtacgccaatattaagttcttgccggaaatcagcaaagatattgtcaacgttcgcagggttcttggtgcttaactttagcttaccagtatatgctttaagggcttatgatgtactcttccaagagggggagtacattgttatccagacgagatttacaaggtatgtgctggacaacccaagccttcctgggacattctctcagcgaaggctttttctttatggtgagctggaaaatttaccttacaagctctatccattaaagaaacagttcaagtacttatctcaaataataaattctggactaaagcatttcatcgactccacaggtaagatagtaacatggaaacctacaacttactataacattatcacagaacgcgttagaggatcaactagaatcttcaacggaaagtaccagtgttatgtcaagaacgttccatatcctttcttacttagtgaacctgccaactatatctcgtacgcgttggttcgcggttcaccagttatttttgacacgcacgaagaggagccagaaactcctagacttagagttaagatatgaagatagttatatctaataaaatctattgtaaacccagcaacgaactgtgggaatacttattaaaacacacttcataccagatctttaaacctggggcaaagtatcctctaatgttccagaactcaggatcggtaggtaaagagatcaagtggtttcccgtaaccagattagatcttctagaatctttcgggcaaaaagtgacagagatcgtggataaacgtactctggttcctgtggatattccaaagccatcgttcaccctgagaccaggggatcagctccctatatatgaagactgtaacgatacgtgcattattaatggtaagcctgggttcggtaaaacgatccttgctcttgctatcgcccataaacttgggcaaaaaacgttagttatatgtaccaacactaccattcgagctatgtgggagaaggaggtacgcaagttctttgggattgagccaggagtcattgggtcgggcaaatttaatatcgattcccctatcgttattagtaatatacagacagttaacaaacacggagccgctttggcaaaggaattcggcaccgttattgttgacgaagtgcatcactgcgttgccaccacgtttaccaagtttctagagcagtcttcggcacgatataagatcgggctatccggtacattaaaacgtaaggatgggttgcaagttatgtttaaagactactttggaacgaaagtatacagtcctccggtaaacaacactctgccacctactatccataggtttgcgctaaaaacgcaggtttctggaaatatgaatgtgccgtgggcgataagggctaacgatgtatactcgcagccagagtactttcaacaggttgttgacttgtgtgagttatattcgatggcaggtcataaagtcctgtttgtgtccgatcgtatagatctgatcgagagagttacgaatgctttggaactcaggggtgtgaagacctacacgattaccggtgtaacttcgctcgatgatagggaacaggtacagattgacgtgaccaatgacggtccgtgtgtattagcggcttcccaaagcatcttctcggagggtgtgtcattaaatgctttatcgtgtttagtgttaggctctttaataaataatgaatctctaatcgaacagttggcaggtcgtgtccaacgtatggcagatgataagttggacccaatcctcgtggatctgaagctaggaggtgtaggattcaagcaggcggcaggtagagaagcggtatatcgtctcaatgggtgggaagttcttgactttaacgagaagaatatggcaaacttagataaaattctgtttgctaagaaccccaaagtttgatataatatttatattgaattgagagacagatttacaaagaagagttaagcaaatagttaaaaatttcagttgctgagtcctcaaaaatacgatataatatctgtataaattaatgggaacagcaactgaatcttcggaaagtccgaagcagaaaaataaaaaacttagttgctaaattctctcaaaatggtgtataataatcatgttgttttatgattacgaaaaaatttacatattagcgagaggtaactcatcgctgattgtacagattatcagacgaatggttgaagatcccgaagctcatgtgatgttaacgggtagatcatttatcttgaacgaagatacaatcgtttataataaacgaaagctgtcagaccgacagttggctgagtatctaggacttttgagttttagaaactatgccgaatatagcttctctaaggatacatcactggatatgcaatatattccgccgtgggttcctagagcagttatcgagcaccacccactaatcgcaatcaacaagtcaaaattgacatttatcgaggaaaaataaatatggctactaaatcttggggttctactactggcggttctaacggcgacaaactggactacatgaagttcaacaacggtaagaacgttgtgcgtatcgtttccggcgttctcccgcgttatgtgtactggattcagaacaaagaaggtaaaccggctccgttcgagtgcctgcgtttcgaccgtgagaaagagcgtttcatccgtggagcatccgatccggttcacgacatgggcttcaaggatccggagaagaaagatggtaaggctcagccgctgcgtcctaagaaaaactacctggccgttgttatcgaccgtactgataacaaactgaagctgatggaagttaaggcaaccatcctgaccggtatccactccatcatggcccagctgaatctggaagatccgggtgagatcgatatcactatctccaaatctggtactggtttcgatactaagtacgatgtacagcagatcgcagctatgcagttccagatggctaaaaatcagccgggttctaaagaggccgccctgcatgaagccgacgttgctctgattggcgaggctctgtacaacgaagcagacgaattcgaaggcttcgaaaaagtgcctaaactggatgttacctacccggttccgtcctatgatgagcagaagaaagcaatccaggcatggctggaaggtaagaaagatgaggagggcgatgaatctaaaggtaatgaaggttccgcgaactccggtaacatcgatcacgaagcagcttctgacctcgattaatccaaacaaggggagcttcggctcccttttattttgactatgaaaatacttttctcagcagatcatcacattaagctaggagcgaagaacgttcctcaggaatggcagaaaaatcggtttatgcttctcggtgaaaagctggacgaagtgtttggagctaccgggtgtgacctacatattattggtggtgacatcatggatgtttcagacccatcttcagaagaagttgaactactgttcgcattcctagctactctccaccatcctggtattatttacaccgggaaccacgaaatgaaatctaaaacgatttcttgcctggatcactatgcagcagcaattagcgacgcaacagacgggctttggaaagtcgtcaaagactaccgatctccagagttcgatatcatcccttacagcagccttcacaaagctagttggaagcccagagtttcagacatttgcttcacgcatgtcagaggtgcaatcccgcctcacgtcgtaccagaaatcgaccttgaaagattcgtcgaacatgggtactccaaagtatttgcaggcgatctccacagctacaagaacagccaaaagatcggggacgttgacctgctctatcccggatctccgcttacaacttcgtttcacagagaaaggacgaaaggaactaacggagcttttatcatcgatacggtcttgccaagagaccatgagcactacctttcgtgggttgaactgggagatcttccacagctcatacgaaaaactattgaagtcggcgagccaatggaagccgatgcgtatgacagagttatatacgaagtcaccggcgacgtatcgcaactcaaaacgttaaagaacagcgaactgttagataagaagatcaataaccgtgtcaccaaagatgctaagttagatcttgacgatatgtcactactacaggagctggatacttattttacaaacgtgcagaaactagacgaagcgtctagaactcgcatattaaagagagccgctgagtatgtcgatagtaattaataaattgacaatcagccattttatgtcgtatgctgagaacgtggtgatcgagtttgataatcaccgcgtaactcagttaatcgggcgtaacgggctgggtaaatcaacaattggtacagctctagaggagcttctttataataagaactcacgtggtatcaagaaggacgacctgtttaactggcatactggctccaaggcctatacgctagaaggtcagttcacaaaagacggtgacgtgtacaacgtcaagaaagttgtgaagtcaaccgccaaagtaactctcactaaaaacggtgaagatatcagcggacacaccgcaacccaaacgtataagctgatagaagaggtactcgcctgtgattttacgacatttactaagctcgtatatcagtcagttggatccagtctcgacttcctcaagactacggatgctcagcgcaaggctttcctcgttaacctgtttgatcaggaacaatataaggaagtttctgaacgtgttaaagcgggacgtaaagccgtctcggcaaaactgtccggattggaaggtagcctgcgaactgcccaatctatactttcctcaaaagcctcgcttggcgcacctcaatcagagatcccaatccctgttttcgatgaagagccactagtcgaagaattaaccgaagcaaaagtcaaggtagcactggctcagaagcaaaaagccagtattgcaaaacgtagctctttggacatggccgtacaagctgccgaaaaaacttttgcaccatttgaaaatttacctgcgcccacctcgaaatctgaggaactcctgagtgttacgcgtaacctaacggtcgtggcaactagagcggatgatttgaagaaacgttactacgatttcaaaaatgcggcaggtaaaactcagtgttctgcgtgcggaacccacttagacacctccgccgctcaagaggccatgagacgaactaaggaggagtatgatccgctgtataaagaacgtcaaaagctggaagcagaagttgaagaacttaggaaggaagatagggcgtttaaggattatatctctaagtttaacgctctggaacaggctcgcaaaaacctcaaggaatttgatgaggtcaatggaacgcaggatgaaatcgtagatgcaagcggattatctgaacgcatcaaagctattgagtccagtattcgtcagggcagatcctcagtagaacttgcaagaacccataacgaatcagttgtacgtgaaaacgcgaagtacgaagctaagcgggaacagattcaaaaggccgagcaggaatttgataagatccaagccgaactgtccttagttgcggaagaggtagcagatctggatatcttgatcaccgggctgaaagatctggtaggatataagctagagcacagcgttaaagtattcgaggagatgatcaaccactatctctctatcatgaccagcggtaaatttgctctagggttcgagttggacgagactaagctgcaggttgtcatctacaatgatggtaacaggacttctatggttaactgctcaaccggtcagcagagtcgcatcaatatctccacgttattagcaattcgaatgttgctttcaacaattagtaaggttaatatcaatctactcttccttgatgaagttgtaagttatattgacccggatggaattaataccctcgtagaacttctacaggaagaagatcagctgaactcaatcatcgtatctcacgggcacactcacccttacgcccataagattgaggttaaacaagatgaagctggcttatcaattttggaggcctaatggccgtagatagtcgcgagaaaggaaaacgcgcggaataccaaatccgtgatatgctgcgtaagtatacctccttggactgggaacgtgttcctggttcaggagcttttggacagtcccattccctgaagggtgatgtgtatttaccgcccagtgtgggtaaaatgagtcaatactgttttgagatcaaacactacgcagacgagaaatttaatagcaatatcctaaatgttggagagtcccagctagaaaaatggtgggcccaagccgcacgtgaaggtgagcaaatgaacatgaaaccagccctgatctttaagaaagatcgtggccaatggcttatcgctctggatagtagcgaccctatgattgataacctcatgagtagagcacatttcatagtaaataaacgtggaatggaaattgttatcggtctttttgagccgtggttaaacgcatgtgatattggagatttagttaaatgagtaaatcctggggaacaatgaaacgagaggcagaacaacgcctcgcctcacgccgtaatcttatgattgttgacggtacgaacttgggcttccgcttcaagaaagatagtggcaagcctattgcagcgtcctttgcaaacaccatcaactctctggcaaactcctatgacgcaaagcacactatcgttctaggagataaaggaaagagtatcttccgtaccaatattttcccggagtataagggcaaccgagacgcgaagtacgccgatcgctccgaagcagaagtagaagcggaccgccagttcttcgagtacttagacgatgcgtttgatctcatcgcaagtcaattccctactttccgaatccgaggggtagaagcagatgatatggcggctttcattattcaactgataggccaccactatgaccatatctggctaatctctacagatggtgactgggacactctgttagccccaaatatctcccgcttctcgtttactactcgtaaagaataccacgagaaagatatgttcgacaaccataacgtagatactgtagatcagttcatctcattaaaagccattatgggcgatatgggtgataatatccgcggtgtggaaggtatcggtgaaaaacgtgggtataatctaatccgggagcacggtagtgttctagacattattgatgcgttgccactcccggggactcaaaaattcgttcaggctctgaataaatcaggcgaacttatggaacgtaacctaactctagtagatctcccaagtttctgtggagaagcagttgccgcagcaggacaggatatctacgaccaatttgttaaagacattatggctattgccacaggagaagtataatgcgtattaaattatctcaccccgattgtaaacctcacgttggaagttcggaagccgccggtatggatctacgggcctacttcggagatcgtgcttccgacctattgcgtgccatacccccaggggagtcattgatgattgataccggagttgcggttgagattcccgaaggttgggtaggaattgtggttccgagaagttccctaggaaaacgtcggctaatgattgctaatacagtgggggtgattgactcggattatcgaggaactatcaagatgaatctgttgaatatgagcaatgagacacagccaattgataatttagagcgtctgtgtcagttggtggtcgtacctcattataaccccaatgacattgaaattgtcgatagcctaacagacactgatcgtggggagggtggatttggaagttcgggaagcaaataattttactgatcctagtatggtaggtattaatatgccaacttatcaggttaaaactactgaaccagaaatgttagtgctaaaaacagacaaagagggtaatgttactttctgggatcctgaaggttttgtagaactttgtactaatactgataatgaacatttaaaaatactattaattatctataatcttggtattatagagggctgtagaagcatataatagaaaaccccagtggacaaaatccactggggtttcttttttgtcaaactttactggatagtaaaaatttaattacttggattaggtatactatttgcctctcaaaacctctattagacgattagctgagtattctgcgtataatattaccattgagtgcttagctagagtatgtttttcatataaaatgttatgaaaataaaggagccgtacggcccctttgattattcacctttcagttttctaatctcctctttcagttcgtcaacttgagccgatagagttttgattgcgcaaattgcatccatcaaaagcgcgttattatcaagtacaagtttcttattctcgactacgttcccgtcctcgtcctgataggatgcttcgctttctttgacatagcacgggtcaatctctcgcacctgctgtgcaataacgcctcgacgctctcgcttctgatcatcatccttataggtgaacttgaccagattcattgctttgatgttttcgagtgattgcaatccatcgtaatcaacaacattgtctttatagttaatgtcagaaagaccagcaaaaacaacgttgccataagaagtgcttgcaatattaccatctgatttaaattgccaatactgcgtagttccagaggtaccccatttgctgagctcaataacggcgcgatgttcataccccctatgttcctcaagccacatagagcaacgagcagcgttaccagttgtgttaaaccttgagatgaatgatggggctttaagtatcgcgccatttcctccagtcggatcttcaaggggccaagcaacgaaggcgtcattatggcaagccctaattagccctcgcgctgtgaagtcattcatagtgcgcacacttcgacaatcaagcgttagctgatccactgcgtcgttgataatccttgccgtgaaatccgcgctcgatttgttaaagtgaaaatcgacatacggcgctgcatggtaaagctcaatcccgccgttagtagttgtaatgtttccgctactaacagtaaaccccttgcccacaacttcgccatcaacaaccatgttaccacttccgtcaatcgtcacttgaccacttccggatccatcgccatttggacgcaaataaattcgctgtccagcttttgcgctaatgattggctcccctccgctattgcaacgaattgccgcgccttgaccaaatgctattttggtatctccaccacttgcagccgtgcaagagacctcgatcccattgtccgatgccgctgcgccagctggtcgtaattgaatctgtctatcagtgccgccggaggcagacagaaccaagcgaccctcgccaccttcgcgaaccattgcaccgcgaccaattactatccctttgtcacttcctggtacttttgatgctgcaccgccaccaacaccaaggtttccatttaacgagctagcaccactgatagcaagctcactaccagaaaggctaccagatgcacttaacgtcttaacactaacgtcttgattcgtgccacttacaaccgactcgcgccatgccgaccacgttccattgttgcaataacgcacgaactcgcgatttgactcagtgccaaaaaggcgctggcggttagtaaaatcagtgtccctcactttgcggatcgactcgacgtaaatgatgaagttaccagacaccccgtcaggcttgttggtgatattgctaccgcctccagcgtctgggcattgataaacataaaccgttccagggtcgcttttcttaatcatcaaggaattaagatcaagtgtctgcccacctatgttttcagcctcccaagccccaaaaaagccattagcgaacgtcattggtccagcaacagagaaaccagcatccatcattttacgcgttacaaccttgctgttttgcgcttggtttgaattttctccataagcgagatcgccctcaacatcaatgcctaaaagctttgcactcatgttgttaagtttaaacccaatcgacagatcagaatcagcatcgcgtgttaacatgattggcgtgtgttgcttgccactaactcttagacttgttgccccagtgtctgtgtcgtcattagagaaatcagcggtacgagaagagatcttgtaactgatctttgcgtctcgtgcttcgattcggccatcatggtgcacaataaaatctccaccagttgtgttgccagtggtctttgcgcgaatgcgtacctcacccagcgattcattgtttggcggcgaccaaatcaccccgcgctcgcttccatctgcattcatgaaccataaattagcgcttccgcttgcagattttagcctgatagtcggcgtcccttttgcgatatcaaggtcacccgtcatggtatcgccaaccttcttaacttgagcgtcgttggttacattgcttaggccaacatctgattttgatggtttgttgactgtgccaaaaagggtatttacctttacgtctccggcgttgaggcttgcatcattggcggcgagtatcacaaccttaccgctgttatagtcaatgttaatcgctgaaatagtgtctccacagcgggaagacataccagagccgtgagacataatgcttgagctagctccagacttctggcttgctcgccaaaaatgcccacctttctctcttatacgctgcaataagtcttcgttgctggtaatgttatcatatgaaataccattacccccaagaccgaaagcacctacctgcatcacgttatcatttgacgtaccaacatctctataagctgccgaacctagccccaaagcctcttttgacggtttgttaagctcatcatacacgcgtatagccttgctttccacccagccggctggcatgtcgttttggctaacgtatccgtccgggataaaaagataaacttggggggtttttgcaagaattgccaccttcacatgggaaatgaaagctctctgatatacccaaatctcaaagaatccatcacccttaatgatgccgtaccgcatttggtggtcttccgtaaggttaggatcaccaaggcggcgaatctgcataaactggcgaacgtttgaagtgttaataacggttgttccaagcccgcgcgccgacgcatcaagaaagtcgatcgaaccaaaactagagccatagttacctccgttagtgatcattagagttatatggcagtcacccatgccagggtcagagatctttgcaattctcacatacttagcgcctgacgctgtattcgcgggccaatcgtattgagtcagcgggctggcaataagagaggctttatcggcatactccttagcattcgtctcgctagtctttgcattcgtttcgctagtctttgcattcgtttcgctagtctttgcattcgtttcggatgttgcagcagcgtttttgctgttattagcgttcgtctcgctagtctttgcattcgtctcgctagtctttgcattcgtctcgctagtctttgctgccgccgcactcgctgctgccgctaccttactactgtctgcgctagtagcacttgttgccgccgcgttcttgctggctgctgctgcgttttctgacgccttggctgttgtctcacttgccgctgccgcgttcttacttgctagcgctgccgtttcgcttgctttcgctgcatcttgactggtttttgctgcgtttttgcttgctgctgccgcattctcactagcttttgcgttagtctccgaagtcttagcagctacttctgaagccttagagtttgtctccgaagtcttagcagccacttctgatgcttttgcattagtctccgaagtcttagtagctgtctcactagcttttgcattagtctctgaagtcttagcagctacttctgatgcttttgcattagtctccgaagttttagcagctttagcactattagcagaagcagtagcagaagaggcagcttgagttgcagattgttgagaagctgccgcagagatagcggccccattctcggaagctttggcattaatctctgactgcttagctgcggcagcagaagctgcggatgcttctactgctgaagttaactctcctgctgtaatagaactgatagaattagctaaaactactgtatacttagggtacttactagcagtagttatgttatcatctatgtttagaagctgctgtacaataattttagttttgattgccattattgagttactccatcactgatatagactttaccttccatgatacggaatgaaccgacttctgagccagtatcatcacgagtcattagaatgtcatagtaaccagcaaaacgttgtcttgggttatatttatcacgttctttggatgctttattaccaatattggtaacatcggaaattgaaagactgatagtagccaccccatgagtagcgtcgattacactagttttaaaggttgctaaagtctcagcattctcatcaagatttgtcttgatagttccacggagtgaatagcctgttaaattcacgagggactcagttggaggataaacactatcatcaacatccataaactgcatgataagaccatacggtactttctcatcaataacaatatcaattactctattttctgtactcattattttaccttatatggatatacccagtagctaggtctatcttcattctgtaagaggcttccggattgtttgataacgctgcatttctatcatagataacgttaacaccgatctgagataagaaggcatcattcgccacaatcttactagcggttaccgtgccgttaactatcatattgccgtgtaaaaccatcgcagggtcagcccaactggagccattccattgacgagtaaatgcagattgtggagcactactgttaaactcagtcaacacgtcatatttaactggaggactaccaaaattattctgaaagaaggcattagcctggctgtcattccaacccccaagaccagaaatacctaaagagtacatcccaggaccacgttgtccatcgtgtccaattgtaccttcagtaccactccactgaactacatctgaccagctagtacctacaagtaatttattagttactggatcaagtgtacctgtagtcacatagatattttgagtcatatccgtacggttaggtggggtcttcgaccaactaggtggtggataatcttgctctagtggttttgcaggaagtgaggatgctaatttataaacgaatactgtttgtttaccttgcatacctgtaccaagatccacatcgccatttggtgtaccaattacaactttattagaaattcttaatgtatcaccatcgtaacgtatatactgtgtagcgttaccgatgtctaatttaggtttagcattggtattatccatacccatccaaataccagactttgcatctccccaagttttaccttgtgtatatattgccgggttatcttgaccagttaggttagtcatgacaaaattagcagcattaatagttttagtgattacactaccatcaacgttaacaatctttttaataggatcaaaagatattggcgcttttccttccgcgtctagaagacctatattaacagcaccagtggcggcatctattaggaaggtttgtttccaggttgtgccctctttgatcttacccttaatgtatgcatagttaacttctatacctgtttcgttaacaaaattattatcaagtggggtatcttcatttagtataaatgtctgtgctgtggaatcagtagtatcctgtatatttggtccccaagcaatagatgacaccttaaatttatgttctaccttccaggggaatgatataattgttgccgactgagcagcccccacgttgattttttgtgccttagtccatccagttttagcaaattctgttgaatctatataggatagaacgaattcacgaacgttagcgcctgtgcctctattccaatcccattgtacacgtaaatcatagcgttctttaccatcggctatacgcgcagctttaaatacaatattaactggagctgtaggtgatacaaagttatatttaacttcaaaaacagtagggtactcatagtagccagatgaatcaatagttaccccatctggtagagatacttgtccagaaattcttaccttataggacccaactggcacaccaccaaacataatagttggcattaatgccccaacataatatttaacccacggattattagcattagaattattttttaattctatagtacaataatcagcttctcccgtagtatttagataaactattggtgccccaacacctacgtctaccggctctgattcacatctagcactcgtgattctaggtgctgacttcattttaaaagtttgtttgtcagacagattaatacctatctgagcattaagtagttcagagtctattatagaatcataaaatgcaccctgaacctcataagttgctgtaggttttagattattgatagttacagagaaagtatcaactccagtaaaatctctacgagtaatgttgctaccttctttaagccaaaaagatctgcctataacgtcgtaatcagagtagatagagtgctggatatacgccaatgtatatccagttacgacgctatttaggaccattttagctggtgcattatttgaaatcatttagatatatgcccatgcaaccgacttctcgccccttggtccctctgcctgaattcttggctgaagtgctctataaatccccaaagtattcgagttgttggccttatagtcgagcttattgtaactcaacagataactgtaattatataaactggtgatcttcacggatctaagcagtttattagtactgtcccttatttcaagcgtgtagaaaatccctgaaatcagaccctcttcttgcagtttatcccaccctaactctaggtcaggtccgacccattccgcaggatcaggagacaggttaagcacccggaagttttccaccacactaaggtttttagctgagttcaaatctacagaaattgttactggagagctacgacgaccattaatatcaacagcgcggatctcgaaaatagtcagcccagcaggctcacccacgatatcttggaacatcctaacgttaggcgtgaaagcagtctgctgtacaatataaggatccacacggtctgatttacgtatcgagtaataaactacgttaggcgttaagctaggtagccatgaaagctctccgtttttaccaacatcacccacccttccaccaggtgtgggggtatacttaaagtctcttggtggcaggacattattggatatttcaggaacggcctcaccactgttatccacttgcgttgagttaataaatacatcctcaccatactcctgaagagttacgtttatcttaccatctcttgtgttctccacctcatctactaggaagaacttcttattccagccataacgatcgtaggtgaatactacaggatcgttaggttctataccaaggaatttgtaaggtaaagagaagctcagagaacgcgagtagcgagactttttaagttccctatctgccaaacttctggcagtgtagtagttggttatgttagcaaaagaaagttgaagttttttgtcaactccacgatcttcattcttaaacttagagttatagaatgttatagagttggttttccagttcaaggtagggtcaattagggacgcctgaactgagttatacttctcacggcctgtagtatcagagagctccagctccccataagtatctaggaaattaagctctaacggggtttttgaatctttctctacggtaatgcggaagatacccgataggttattcaacgccccctggaaggattctaatagctcctgcacgttcttgaatacagagttggagttgtccaagattgtattcatttgcattatttgtctgttttcggctgtccagctgtcccacccaacatatctccagaatggttgccaactagtttgataagaggtgtctacaatgtttaatagatcggcctcttttctccagtcaccaatcaccattctatctataggaatacttgcaccaaaagtagtggaggttaggtagtcaaatgtttgccatacgccattctgactggttttatccattttaacagaaccgtctgcctggtacacttttaccttacggccgcttaattctgcggacacttcaggaatatcagttctgttctcggtaatagtaaaccgtataacagcgtaagcagtatctaatagcttgtatctagaatcccagtactccggtccattaccgttctctccctgtaggaagaaattgttagcagcagcaatgtctcttagtaccgtagctaccgtctggtctggcttaccgtggaatgtccagattcgtatatccccgttaccgtcattgtacttgtattcttgaccatgctctgagagagatgttgatggaagtcctgtggagattcttgccatagtatctcccgatactcttttttgtccaaagcatgtacgagaggtactgtcagtttgatcagtacagatcataggggcgtctccaaactggaagtcgaggaatccttcaatctcaccctcacagaacgcgtatactacataaactacgtttggattgtttctttctgtatccgcaaaaacaggtataccaggtaccttctgagtgccatacactacaggaataaacttggctgcaaggttgaagtccaggtctacctctttagtaacagtctcataatactttttaaggctgtagctcttggagagaccgaataatttcttcttagattctagcttgtatcgttcttcttttacttgatatttagctaagaagttaacgcttttgttggcatggaagaagccgtagtcttcttggtattccggtcgtttggcaccatgagaaggtagtaattctccatttacaatctcaagccctcggtgggaggcgtcatctgtaaagcgcccagcaacccgctcaaaatcatagaattcgttagaacagttccaagttataacagaagtaccaactccggatactgtattagtttctttgataccgccacctacaatcttacccctaaagaagagtaacgggccgttagtatctgggtccaccggaaggatttccccattgtcgtcgatgatcgcctgatatatagaaatagagcgatctaaaaatgatacaccactttgcacgagcttaatgacttcattggcatccgtaccagtaacactgaagttcaaactgccgacggttaacgtacggttttgtttgtgactgctaattgttttaattttccctgattggaagagtataccaccatagttgatatctctcatgtagtccgtcatataagcataaacagcgttattacccgtggaccccgggagttcgatagagacaagatacgctaatcgtatcttgtcattgttggcaaggtaggctttcgcagaaggaaggatctgtctcatagactttctctcagaactaggttaaccccgtcatacacaccatcaactgtgatctcttcactgaatgaatctccattcattaatttagtttggaagagaatcccattgaaacgtggtctctcggagccgttggtagtgagcaacagatcagggtatagattaagtgtccatactcctgctacgttcttaaaagatgtaatcttgtacacctttggatgtgtggttaactggaataaatcaccaggcttaggctctccagatagggagctcgtattggtaataaccagtgtggagcctttttgtccagcggcaatgcggcaattgttcgcatcccctcttactcggtaagactcgtaatgtgggagtataacgtcgagatagcctctggtacgcttatactctagaattgctgacgaaagtacagcatactcatcgggaaacatcacaggataactaatgttaagaccccagtactgagtggctgttttaacttcgttaaccttgccgtttggtagctcgtctctgatcatcggatcgttatcgatcagcgtagctctgtcaaacccaaggccgttatactgaggatgtgtaaagggatctggtaatctcatgttttgttttctcctctcaatgttaatattatagtcatatcaagaaaaattttcaagataattttataaattccaaaaagaagggaggacaattacgtcctccctttagtttagttaattcaggttctttaagctcagcccttgttcattcaaggctaactctacagctgcctggaatgccgcaggattttccaatgcgtactccataaagctcttagcatccattgcctggatattcagatgaaccggtcttccagcaccgccagaagaagtttcagaagctactttatccgctggagttaccttggtaggcaccataggagttgcaacttccgtaccgtgctcacccatcttataggagacacctgggtaggtgttaccaccttccgcacgaggaataaatccgttggcacttcctatacctttatcaccacgaacgtatgacagctcaccagagcttgcgcccatactaacgtctacgttcttctggcgttcacctaacgtcaggtaagaggcagtttcaccaccagatcctgctatatcggtcattccagtagcactagatgcctgtgctagagatagagcacctgcaagtccagccgcgatcatcagaggaatagagaacggatatggaacagctgttgctgcctgcattaccgctactgctgtctggataatgatctgcttcttagcagattcctgctgaagtttaatcttctccgcttccatcttcttaatcttgttcttagactgctcggatttaccgtcacgcttctgctccgccgcgatagctgcatcaattgccgaaatctgctggttagtaccgtagctgatcatctgactaactgtctgcatacctgctgcaatcatggacgtagtgtccaaagacccttgagagaactggatcatagcgttagctaagttccccatactttgagctgtagcagtggcctctgagtttagctgagagagcttactgatagctgtatcgtatgacgccatctggttttccatatcggcgaatttcttatcttccccttccagaccagtagtaggcgtatagtctgcgcccaacgactgtcctacgcgatccatcatctgtgcgttacgctgagatttgagagctgccatttgtgcagtggtattggcaatctccttgctccaacgtgcctgctcatctgcgttacccttcgtgaattccttcatttcctggtagaacgctaactgctcctgcattttctgtgattcgcccattagaggcttcatgctttgattgcgctcgaattcctctttacgcatctcagcagttttagcattacggtcaagctgctctttccagatttccctttctatcgaagcaatattacgtctagactgttcggcttccttctctttgtcagcctgagtcttcagtagggctaacctatctttctctacttgtagatttaatttaaggttcgccacgttatactgagaatccgtcatagtgcgattatttaagagtgcaatttcccgatctatacctactatcttatccttgtagaatttttcctttttagtcgcttccataccctggttcttcactttgagctcttccgtctctaacagagtcagctctttttgaatcgccttgttgtccttgttggtcgccagtacagctttcaatgcctcttttttcgcgctaagttgctgcatttctagagctctaccagcttcttccgccttatccttattacgggtggcagcgtagacctccgctatacgcttctcaacatctagcttagacttagcctcatcatttactatcttctgatagttagacatggctttatacgcagtgttcatctcggttacggtggaatagcccaggttaaggtccttagtcatttgattggctttttctgtagatccaccagccaatgattcaaccgccttaagtgcatcacccagtgccgcagtagccctagacgcagtattggaatcttgtgcaaagttctggatatcattgctcagatctccggaagttttctttatattattgaactccttccgtagagcaactgccccgtctaatgctgcgttgtcaaaggtgtatagtccattacttgcttcaacgttctgcccgatattaagtttccccgccagttctgggttctctttctgagccttagatagagcggagtccctggcgtctttccatttttgaatagctcccgcagaatctgctaactcctgctgtaacatatacgcctgtctacgcatatctgcagtctgttgtgtaaattctttgttagctttagaggctcccagggtaagcagattaccgaacccactgtagttggcggctgtggccagcgcagtggacatatccatcttcgcctctctatccattatctccttattaagagctgcgagcttattttttacttcctcttttgctttgactgcatcatccaagcctttctgagaagcctcaaggttcatgaccactgcgttagagtctttaccgtccatttgcttaatcgactcttgctgggcagtagctgcctctgcggataccgaagccttagacgtatagaatgctgcgtttatagatgcaatgacgggacctagatatttagcagccgcttgttgaaccttacgtaatgcagaatccgcattagccgcaaattgctcccatggggttgctcgtagtacctcgtcaagatagccgaagcgtttggtagactctgctactaccgcattagcatacgcctgctgcttctggaaggaagttagaccctgaatgttatacgttatccctgtattggccgcgttaagtttcttaacgtattcggcatacgcatcatttaacctgatggttacacctaattcgtctagaagttcgatttcctgcttagatacacccttgattacacggttaagtgcatcggtcatatcaacgcccagggtagctgctgccctacgtgcaactagtgcaaactcgctaatctgtttagcgtcgaagccgtacgcggccgcagtagacgcctgacgcattgcctcttcaaaggacaccgcgtggccagtagcttcctgcagtgccacagcaagggactgaataggtgtgcctgtcttcgcccctacgatagaaccaaactgctctagacggtttagctgatcccccatctttaactgatcaaaagctgctttcagtacgtagaggttggatgccaatgcaccatataagagcggcataggcccagttaccatagctagagctgcgaagtttcttgtggcaccacgagcggaccctgaggtattacctagcgcccttgatgcccttccagcagcgctaccagtgccggttaacgtagagtttagaccacctagtcctgtatttacatcccgaacccctgcgttaaggtcggtcagcttgtcggacactttgtctgtgcttcttgccatatcagacatagtggtattcatcttgttacccatagcgtcaatagcagctactatccggttcatctcggctaccatagtacccatgttaaaacctgcagcacctccgccaccacccccagtttgtcctaagcgaatgcgttttgcaatcagcttatcgattgcagcagcggatctaattgcagctgcctctattgcatttagctctggaactactttctggaagttattgatcatccgggtagaggaagacgcagatttagtagccatatcctggaagcctttagagaatcccctctcaagtatttgggaggtagacgctagcttggtttccaaagcgtttaaggattgtgtaatggctttaaactgattaggtagctgtagtactcctcgccctgcttgaattttggctaaagctgagtttacctgattcgccgcttttactagtaggttgagctgtgggataacgcccttcacagagttacctagtgggtttagcccaccaacgctgctcatagatgcgaaagccctacttaactgtcctaggttggcctctataccagataccgaggcttccagatctgcttttagcttggtcatggacgcgcctagtttattaacggatgtagaggtattagccaggttagtacctgctttgatcttagagagtgacgaagctgcctggttagcgttggcagaaagctcagctaagattttgttaactttgtctaagtgaggagacgacgacgtcatcgcagaggtgatatcaacccccattttattagcactagtgctaatattatttaactgggatgtgatccttaacacggacttcgctagcccaacctcaaattcagtgaacttagtccctaacataccgatagaagaggctagggttgttaaactagtagttgatgccagtttctccagagatttctgagtcctagataccgaacgctccactgtagtgaacgttgcagggagcttgcctagactctggttaagtccctcggaactttgagtggcactctccaaggcagcttcaacatccctgatctgtttagcggctttggatccaccacgctgcttgatgtctacaagtaactctcgtattagtctatctgtcatgattttttccaataaaaaaggcctagggcattaaccctaggccaagcctcacgtggaacgcccgttggaggaaaatgtaactcactatctgttagaagacttcattctagacttcttaatagctgcttcaacacgtttgcgagaggctgcaacagcatgtgagtcgaatatgttgatgatctggagtataagactcttctcatctggatcctcgacaccgtagacatcgaagaaaactaaaagggcactcttatctttacctaaataggttggataatctcctggaatataattatcagataagttattatatattgtaagagcagtttgagcgatttcaggaaagtcgtgtatctccacaaaccgtttgagaacatcgggattgggttcctcccccaatgattcacacatcgttagatactgctcttttgttattttggagtctcctcctttaacacatcgttctgcgaaggcgtcaatctccttaagcagtcggttcctgttttgagtcacgaaaagtgtctaggtggaagacggtgctattcatccaggtttcgaaggcgctagagttacgtaccagcattacggcgttgtcaatgctgaactccaccttatcgcctaggcggtcttcaggcacgtcgataagcatcagtttttcaacatcagccactgtcaggccttcccaaccttcaatcgctactttgacgaactcttctgcgaatttatcgtcattctgaacctttacagcaataccgttaacaaactgggtctcctgcgcagcttccagaattttcttagacagcttacgggaaacgtagttaatttttagcttaaagtgcggtaagcctgggtacgcggtagtgatctgtttggtgtccagggcaatgtctttcaggttaatactcattttgttaatctccaattagctttattcggacaggatctgattgctcagtaggagttacgtcgtaatcgatcttgtacacgtcggttaagtctaggcgttttgtgattttagtggatggaaagtccaccacaatatatttatttctgatttgtaccggtaggccaacatcaggtttaatgttatgcgtagaatctatttgaagactcttcgcatagtacatcgatatcaaagcggatgagttcaattcgttaacgattgccctcctattattataaatcttattgatatcgaataaacttctgtcaccccgccattcgcattgctgctggaatgacataccggctgacataagtcctgggagcactctcccattcgaagatacctgaggtaatgaaaatggtagcacctcaccttgatcaagcgtatagctgttgagtgggtggcctacttcctcaaagtatcccgactcgataccaacgtttagcaccgggacactcttatccagagaaaagtcgcaggtggtagcaaaacagttatcgaaacgtaagctcgtgttcttgttaataatatatacggagaacattttaggctcaatattattactgaacaagggcatctgatacattccgtctatctctgtaaatcccatcaactcgaagaatagcccttcgagagcattgctagagaagttaagagctagagaaattgaagaaggagactgagcagttatcttcgaataggcgtagttactgcgtctgtgaatcgtcctacgatttgccttaaactcttcgtaggacgttccagcagtgtaatcagacagagcgtcaaatccatacgccctgccatcgtactcgatgactactctagactcccgcattagggagtatagcattagttatccttatggagtgaccgggttaccgtcaccagagctaatcagtttcgcgatcgaagtcttggtgtacttagaagagaaacctaagtagccctcatcccctgcgtccatctgagtaggaatagctttaaactcgatagatacacccagcacgtcatcagtttcgattgacgggatgttcaggttagcgtgcttagccaccagaacagctgctggacgagcagtatcatattccccacctaggatgattgcaacttcgaagtcgttcacagctttcaggtcagagaccaggtctttatacagctgaatagagccgttagcagcatcattcatgtacgctgtcaaggaacccgtcagctcgaaggaaccagtgaatgaaccgatcggaacatcaacacgagacatgatattaggtgtcaggtacgttacgttgttgttcatggtgaaagaacctcccgtgatcgggatgttataggtttttccgccggtagcgttgttcttcagcttaagaatggtcagcttgttcttgatataagaactctgaatcttagcataaagagcgtcgtctataccgatggttttagggtcgaacggctgtgcggacagagtctctaaacgggtgccgttgcctgaccaggttacacgcccgatatcatcgatatctacgttaacctcagcctgcccaacctggcagttacggatcacagaccaagagctatcggtcaggatgtagatgttcagcatggccagctcgtggtatccgttgtctttaaagttgacaaccaggttagtagcgttctggaatacgccagtagtacctgctagattcacggcagcgccagttgacagcccgtgccacagtaggtagtccggtagaatctgtttacctgcgtcgtcatacggcaggatataagtggagaagctccactcagcagcatttaatgagtcattaaagcgctgcgaaccacgggtcggcttagggccagcctcatttagggtaatatcagtggagttactgtcctggctccaggagacgtcatcctgaactaggatctcctgggtgttggccttagtgaaccccgtagtaacggttgacacgaagattcgtgtattacgtaatagttgtacagacatttaaatttctcctgagctgtaacttatctatccagcgctcttctcagaggcatataccggactgttacgttaacttgagcaaaaccaaacggggacagtataccctcgtctgtggacaccgacgtgatctgcatgtcagtggcttcagaatcgatagttgaaccatcaggtttcattatagtatattgtaaatttcctccagtgtcaatagaggtttttacatccgctatgagtttctcaagttgcatgttaatatcatccttttctttatcatagataagaataggaatttcaaggtaaacccactgctgtgcagacggcaggtagtttccagtttcggtacccacgtggactgctatgtaagggaactcattgatctgctcaaacgaataagtctggcgggatacgtttccatacatattagtaaagaactctgtgggattactcccgtccatgtccttcttcagtcgttccactagggcatcagcaatacttgttctgtaattcattatgtaccctgatttactcttatccggtatctagagtggataaggtctcttgcagccttagcgattgcctcgccgatcagcttctgcgggttcctagcaccagggaaaggccgtagggaaagtccgcggtaggtagagacggcaggattgaacacagagtaaggcttaagcatgtagttatacgtgatgttgaggtcaggattctttgcccctgcgtcttctcttaacagcacgtctttaattttcaaggagttagcgaaacgccccgttctaaatttaaggggtgccccagcttttttcatatccttgactaagtattctttcgctacgagttcaagtaacgctctaaggtttgtgtttgagacgaaacgcccagaagcgccagaaatagcaccagcgtaaccgttgtcagcatctgaaggatctccaaagttaacctctactctaccggtagaccgttttcttcctattttggattttttaccagtgatactatttagaaggttatcgataacaccaacgtcaccttccaaattaagtgacgacgagacagcttttaaaatagaggacgtccgaacattcagtaaatcctccgataccggcttggtaaatcggaaggataccttgcctatggtgccatctttgtggttatccatagtttccgcagtatataccacggtgttcttagtggagtggctgccaccactcataatgtccagctgttctttaactatctgtcgagctagatcgcccaacgccactacagcctccggtacacttcgattatagtacggatgtgttccggtacgccagatttagtagtattgaaagtaacggtttctccgccaaatgtacgagactcgcggtagtccttcttgacccaatgatcaactaggaagcaagccgctaataccaggtcgtcaggaatcgaggtgaagccggtctgagtaaactctacttccatatacccctctggaggggagaatttcagcaagagcgtaccatccgggtagttcttatattgcgacttatcgatctcctgatcgttaatcgtaattttagtgatcgtgctaggcacgggagaagacaggaagtactttttgcgtgctggtttagtaggcagaacgtctacaacgttagcagtgtcgtcaatacctagaagctgagtaatcagagcattggctgctttgattaacattgggatatttgactctaagtcaggacgtttaaggcctccatatgttctccaatcagaatctgtcatgaattgcatattttacccaataaaaaaggagagccgaagctctcctttagtcggcagtatagccaaattaagcagcgtaagcaccagcaactacgccgttctcgaagaaacgcatcaggttcagacgctgagtaacgtagtacgcatcgcgctgacgctcagcctgacgctctttctcaacggtgattgcacgctgacgaggaacgatgaagttgtcacggtaaacaactacacagaactcagcacttgcagctttagctgggaagaattcagaaaccagtaccggcagaccgtagatgcgaccaacctgaccctgcagtttgatagcggtggtagcggtaacctgtgcaacgtcctggaactcttcatcttcgatcagatcgtagtaagcatccatcgaaacaaccagagccagtttgttcaggtctagaccgtggcggcccagtgaacgacgcagcttgtgaatttctttagcggtaactttaacagaaccgtcagctttagcagtggtagcaactactttaccatcgtctttagcgaactggatcagacctttcggggtaccagcagcaccagtaccggtcaggaacgctttttcgattgcgatagcgtgagcttcaatcagacgacgacgcatgatcggcagcagagtgaagatagcatcttcttctgtttcgtcggtcatatacgctttagcagccagtttataggttttgaaggtgatttcagacagcttggttttgtcttccgcaccaacagtagcaggagtaccgtaagtagaggcgtcaacccagctagcttcaccagcttctggctcaaccatcatggtcagcaatttgctagacatcggcagttcttcgaacatggtaccgataatcagtttggcctgaatgtcacgcaggatacgcagggagaagatggtttcgtacgcttcggtagaaacttcgatagaagaagagccgttaacagctttcaggtgggcttcgccacgcttagtaccgaatacatctttctgcattacgtaggacagaagaaccagtttctcaacttcgtcttcgaaatcttcctgcttaccaaacattgccttagcaacgccatcagctacgaaagagcggccattttcacgagcggccagcagagatttgatttcttctttcagaccggtgatttcttcctgctgggagttcattgctttaacgaacgcttcagcggactgtttggatttctcatccaggttttttacaagctccagagcttctgccaggtttttacggtcttcaccagttgctttagcaaccaggtcttccatacgcttgagttctttagcttcctgctcagcagcaaatttgcgagcttcttcagctttctgagaggcggttagacctttaagctgctcagcaatgtcacccaggcccagatctttagacagttgtgcgatatcgtaagacattattatttctccattatcctttagcgtaaccagcggctactaggaatttctctaaattagaaagttcaggttgttcaacaggctggacctgcgaagattttacaaaagacttacgaagctccatgtagtcattatgatttacggacttcgaaaggctaaaagttgagtcttggttgcagggaaccgagactacagagatctcgagtaactccagatctttaataatgaacgtttcagtcatatcgtcccattcggcatctttgatatagaagcctaccgagaacgttttaagaacctcatcacgtattaatgagtaaatctgtagatcagcagcacttacctcaccctcaaccataagtccggactcggtgggtaccaggtctaggatcttaccaattggtcggctgtggttatggccgaaaagcatgatcgggttcttcataaaattcttgagggcgttactggtagtccacgcttcggagagaataacgtcgccggcgcggtctttggtaatcgtgttagcataccctttgatttttaaaggaggattatcaccctcaccgacagctttaacagatttaatctcagcattaagattaatattctgcatcgtttgctccaaacactttcgtgttgttcctcagttttcagatactattattacataccaaatcgcgaatgtcaaaagatatttgaaaatcccacacggtgtgtggaattagtaggcagtcgaaattggttacactgaaaatagttatgcactagcgtagaaaaatggggagccgaagctccccagttaacagatattatacaggtgccttaactgttactgttactgttgcagtgtcggtcttattgccgtcagctgttttaacagtaataactacagtaccattcgcagccaagttagcaggaacagttaccgtaccatccgcagctacggtagctttggtggtatcagcagaagtgtaagttacagacttattggttgcgttagctggggctacggtaccagtaagtttgccggtcttacctgcttcgattgtaatagtctttggtgacatagtgacaccggtaactgctacaacaggagccttgacctgaatagacacttcactcgatttaccacctgcagtggcagtaattttaacagtgcctgccttagacagggctgttactaatcctgttgagctcacagtagctagggtagcatcgctagtattccacgttacagttttgttatctgcgtttactggtagaaccgttgcagtaagctgtacggtcttagtataatctaaggatgcgggagcgcctgtgatactaacagaagttaccggtactggtttagttgcttctgcgtaggcttccttaaactgcttccaggttttacggttagtcgcagcatacccgtattccttacgcaggatctggtaggtgaggtgtgccttaacagtagccagcacattgtgcgcctctggcaagccgtttgggaatagtgcttttaatgctttatagtcaatcattgtttttcctcgtctttattgggagcgccaccttcttgtccacttactccagtagctgatccagctacgttggcagggatgcgaattttcttcatctgctcgtcagccagttcctcataaccaagttctatacgaccttcgttaccagtaaggataccgttgttgaccagtgcagttacgaatttagcctctttctccttgtcaggagttagtgctattacgtctttagtattgggcgttactttaaaaccgaagaagaacgtaagcgaactacatactttattgagcataggcacaatagtcatgtagtagaacagctcaatgttcggtcgaatattggcattgttacccccatcgatcagtagctgtgggaccccaagagcgatacatacgtctttattaaaccgagcaatatcgttctcaaaatcgagatctttaaaggaagagatctgagagtacggcttagccttcatccctccgtctaaaatgagcacagttgattggccggtactagggttatagtccagctgaagctcttcttgtttacgttcacggagctttttatttaggatttcatctgtttctaggataagaccgataaccgtgccgttgtccaggaacttctccttgaactcaagcattttctcacgcttagtaagcgagttgattacggtagctacgcgtgactgacctgtgatctgggagttaataccaccattctggccgttatctttgatgaagataatctcatcaacgcgatagtcgatcatattattaaagacaaatttgttaacgaattttttgtcatctgcttttacttccattagggcagcaggcagatggtacagagacgaaccgtcccaatggatatacgcacagccttcgaatagaaggtcagacactattaggcgtctaaaagtactggaatccatgtatgggttagggcgaacattaagcagcgtctcaagagttttactcctgatcgtgccataggttgttattgttttatactgttcacctacggtgtaggagcactcagcggcgctgtcaattaccatgttcgcggatctattaaggatctcaatagacgaataggctttgccagtcgtgaatggcttgacgttagtacggtgactaacatcctccaagtccctgattatgcgttgtccgcggtttagtttagtaactaaccagtcacgaatagccattataggaaccttgtgaatcctgatttctcagtcttgacgtcagtcggaagccacttcgcaaagcctgatctttcgccagtgttgcttgtacgaggtgcttctggattcatacatctttcacgttgtttctcaacccaaatcttctgtttgttagctgaaaacaacggtggttctttcgtatagaccttgtgtagggtctgatgatgaaagacacataaggtgaccgtgtcctctaccagctcatgccaataatgttgatagaacttatcccgattgcttaggacgacttctgagtcagtgaaatccagttggaattctttagcaaagtttttaactagtaaggccacagtcgagtagtggtgtagctccaggttttcctgtgagtcacaaatggcgcaacaggtgcctcttttgtattgggctttgattccgtcacgcattatggagattgcatctctcttatattttacattggaagccaaagtgtttctcctcttagtcgggaaaatactacttcgggtacagcaattaaatattcctctcattcaccctgatgtctatgagatctctcaaggtatgaatatattataactgccacacacgaaattgtaaagtgaattttataaagttggaacggaatttgtactcactactatccgttccaactcagctcttatttgccacgggaaatcgagtagatgccgtaacgtagcgcgtcacataagtgagagttggcatcgtgacgaggtttctctctggagagcttctcctccccttcctggaagtcccacttgtagttctggagagcgtgaattagcgcagtgcacgaggcgtcgacaatgatcttaccctgctggaataaagcagctaggcatgccaggccgtccaggacagatttcttagcaggagcagaagatatttcatgctcgtatgccaaatcctgtcggaactgtgcggctgctgagtcaacgaagatacggtctacgttataccggtctatacagtgttgtatgtacatggcatgctgtgctgtagtcttctctgcctgctgatattcctcaaggatatagtaaatgtcctgatcatagtggtacttaatagtcagtactgctgtcgggtctctgtaaccaacgtcgatacctagaatggtttcgaactcgtggtctgctgcaaagaagtgacccatacctgcgagatcctgtacatgctcggaaacgctaaaggtatcgtagatctgaccttcgaatacggagaagtccgcctcatattcttgtttgaaatagttcttagatacagtcttacgtgcttcttcgatatctgcaagagatacgcgagggttatctcggtatgtaccgtggattgatacccactgcggaagatcttctcggaacccctgctcgtagaaacgtttgaaccagttacccccacgaggagtagagataaacagggctttagagttaggtttgtccagtgtaggacggagctggatatcgaaagcgtccccaccaacgtcggagattgctgcttcgtcaaagataataaagtcgtaggaacgaccaactgcggagtcagcctgcgcagcagaagccagcttaaagagcgaaccgttagcaagttcaatctctttatctttggcgttctcacgctcagtttgaaggccgtattttttaatcagacctttgatctgcgcccaccctatgtttgccagggaatagttcggagctactacgagcaccttaacgttcggctctaggagtttaaggaagcctagagtatacgcaatgaacgacttgccaacacgacgggatacgcatgctgtaacgaaacggtgacgtgggtcttccagtgcgtttatgattgcgcactgcgggccgtttggaacgatcccctcggtggccagcaagccggacaccgggaatttaaagaatcgcttatcaacaccaaaatccaccacgtcagtcgtattaatataactacgtgagatttccattacttacctgctcccacaatgcgtgacaggagatccgtgtagttagagtcgtgaccacctgccaggttgatctgagtattagtctggtgtacaggtgctttagcctgcttcaccttctcatactcgatttgcatcttcatctcatccatcttcatcttgtgcatgagtttgaggatatccataatatccatctctgaacccattccagtttcatccagttcctccattttcatagttagaacagtgtctagaatgccgaagaatttatcacggttacggaagccagattccatgaagatatccgtaaggtacgctttgacctcaggtttacgcataatctcacggaatttaggctcttccatgccaacagctaacgctgctttcgcaacgtcgctgccagactccaagtaggcctcgataactagcatgccttccggagacattgcatctggtacaattaaatcattgctcatattgcctcctttaggcaagcctttgcacagcaatcctaacatcaggaagaatcactcgcatgttcataatattagccatttcagtgttaacccatacctcaacactgccatcagctctggcaaccaaccagtatgtaatagcatagtcgccttgagtagcagagttagtagtagcaggcgcccacatggccttcatttgcatggcgttgttcccaggaataaccccacattggactaccgtaccacgaataaagtgaaagggcacacacatgttaacaggtaaacacatgatttgatgcacacgtttctggaagtggtttccaaaaattctcagcctactatctacctcgctccactgggtaagatcttctagggggttataacatccaatccctgcagcagcgatccactcatcgtttttccagtctagagtgacgacgcaagctccatttctagagttattaatccctaaccataaggtagctagatgatggctggcgttaccgctagtacgtaggttccccccaatatcagcgaagccggtaccacctactaggcggagaggtcgagttgcctcagaccatacgggaccccattgatttccaatctccggtggattggatttaacgtaccattgagcatcagacctaaagttgtataccccaactgtggttacgtgcatagcactaacgttaccctgcccaaattcggcactattatccggtcgagtcagcggctggttgaattgggtgtacccattattaccaatagtagcatccccattaaatctagcaacattagttgcaataaccctgatgtccggtctattacctgggctgtagtttatatcgttctggtttataaacttccacccggtgttcattaggtttataccgtttacaataaactctcgagggctgattttaatctcttggttgcgagagccaaatacgtcctctgcatagaacccctgcccattgtatttcatgttagtaatataccagcgaacacgcttagggactctccagttgttatccctataaatagcgttgttaccccaaccactaccagcattattattatccgtgttctcccaccccataaagttattgggcggaccacggaagaaacctgctttatactcaatctcctggtatgactcagtttggatattatgtgagtacggaccgccgaccggattggaactctgcccatatctaggacccatgtgtccgtatatgttacgattgagggtctccccacgtaaacatatactgttaaccccagtagtacgcatccaaggatgacgcattgcatctgcaccgatggtaagaggtctgttaggtgcagttatcgaaccacttactatattacctgggaaagctcccctatagagtacccaaccagctttaatgattgtctggaaatttggtcgtataggctgaccaaccggcggcccaggacccctgtcaccccactcggagtttactccccaggtgtacatacacccagtaccatcacgcaacttctcattaatagtacctggagtttcctcaaaatagaaactaacatccatatgcagatcagcagaagcacaaacgttagtcttcatactagccatagtacctgcagaagcctgggaaccgatagtattactaaagtaagcgttatacgccttggcgcctacacccagggatgtaccgtaaatgaaacgtctagtaccatcctcaaactcaacttcagttaagacaactctgtcgtagtctgcggacagtacctgaataatcctgtctggcattctagtacaacgataccaatcaccaccatcccagaggtctctttcgtgagtttctaaaactacaacgtgaggcatatcactatggaatatagtatcccaacctggatttgtatggttattgacgtctttattgttgccagaggtgagagacaatactttcttgtcgcctatccttcctgcataaaagcccataaaaacctcaaaatctcacttgctaacaagtgacttttataatataatattattataaattaaatcaaccgccaagtaaaccagattttttaaaaccatctaggaggaccactatggaagtagttataggagcacttgttttactctcaatcgtactatttgtcattaccgtaaagcagggtaaggcaatcaaacagctagaacgcactaacggggtgttgcaaaagtcttacgacaaccaaacccgtttgctgcataaggcacagttaaacctgtctgaatgtaaggcagaactagaatcagcaaacaagatctacattactaagggtatggtgtaaaacatgactattgtattaattttcacaacattctttttcctggcagcagtttggtttggtgtgcgggcacatgacctgcggaacgcggtagtagcggcagatcttcgtaacaaaagcctgcatcaagagatccttcaaactcgggcggagcgtcaagtagcgatctcgaaacaccaacgagtcatgaacgatcttcggaatgaccctagcaacccgtactacatccctccagtgacaccgcaggtagagagacgcaaacagaatcgggggaactcgggaagttctcggcagctaactaataattcttcatcgaactcgggaagttctcggagcgatgacgggtcgactgcggcaatcatagctacaaccgcggcagttgcaacgtatagcgggtatgactcgggaagttcttactgtgacagcggcagtagtagctttgattcgggatgttccttttaatactccctttagccttttctccaaatttcataaagttacacatggaggtgggcttagagggttggggggtggtatggtagtccgattaccccccccccccccccctagctaactaatagtaccctaactatttcgttagggtactattaactttcttatgatgcgatggctaacgattgaatgaattgttgcggcttaattccgtagtcgcttctttcttcttcggtcataccttcccagcaatgagctaaacgctcgcaaagatattgataatcattatcatcatccagcgcttcatctatgaatgactcacccgcaaggcgcacaccaatagacagaatatcgttgattgccgttgcatccatcgtctgaaggccagcagcagcagcagcagccagtacgcctttattatcgtctatcatggtgatagtagcgttcgggtattcagctttaagcatctcgaaataatgcgttttatagatgccgtcttttgcatagtacaccgatttataatcggcatcaccaatatagcggtgcaatacatcgcgggatagtatctggatattaccaccgcgccccgccctgatacgttgtttccgtaggaaatagtaatcactttttcccatataacgagcggtaacaataatgtttaatacagtgggatcgttaagcgatgcccgcatatattcaaccaaaggtaaaagagtgtcggtcataattgcatcatgtacgcaagccttttcccggtacatgtttaaatctaagttccctttctcatccatacacgggaacacgcgggcgaaggaattaataacagttccgtctaaatcccataacttaattgccttaattgccagtttattaaaagccattttcatttctccggtttcggggttgttggtaattaatcaagcgagctatattataactcgctttgttaattatcagaagaataaagttaaggcatcggctaattcagccggtttaatccgggtagccattaccgggacaattgccagcggcggcgtatattcgctagaagaataatccattacatcgcctaacagataggtatcatcataatcattttcgcttacgacgataaacataaggccagcggcggcggcgtcaatctctacgatctcgcaaatatcagcttcataaagaatagaatcggcggcgactaattgcgacacaatgccggattctttaaaatcagcggggcgcgggaggatagcggccacggcttttaataccgtggcgccgtcaacggtaatgattttttgatagctaacatgcgggcgcccttcactgtcacgggtaattacaaggctattttctacgacgttggacgcggtgaaagatttacgattgttatagatgaaagtaagtttcatttatttctccggcttatttatttaggggttatttattgccggggcaattgccccggcttttttgttatgcaaagaaagcgccgtctttaaagtcaatcaaagtgcgctgcccgttttcataggtgattagatgagtctgtgaccagctagacgcgccaatgttatagcccatatccagcgagccagccacgccagcggtataaacgccgccgtaaatgctaggcgtatgcgtatggcctgtgttcatcttgccgagcttacggaatcctttcgggttgccacgagcgccgttaatgccgttgtgaccgtgggaaccgcattcgatgcccgcgattttcatcgattcatccgtggtcaggaatatagcggcaaaatcgcagccagcaacattgcgcagggcgtaatccagcacgttaaaagtgtcgtctttgttttcgattgcctcataaatcgcagcattcaggcgatagtaaagatggccgttcgcggggtcttgctgaatgtttgctttgctatcatccagccagcgagaaagcgccagatcgtgattagactcaacgatgaccgtttgactaaattcacgttccatttgctccaatacgcgcccggtatcgataagatcgtcaattaccttgtcacgtccagcggcgtactgtttcgcaaggaaaacgccactagcgcggttgtgatggtttcgtgatgtaaagtcatgcacatcatgcacaatctggtaacgagggcgcaggatgtcgactagcgcggttccgctagggttgtattcccagcttgccgccgcgacagcgtgatccagtttttcggcgtgaatgtcaccatattgcagcgcggcaacatgcccggttacttcttcgccaccgttaacagtaaacttatgattgagatcgtaaaacatcccgctttcatccatcgtttcgatttggcgagcaaagaagttgccgttgtcgtcgatctctaccagcaaagcgccatagttatgcagcgcttcggctttttggcccgctttttgctgaatataatttttcagcgtcgccgttccggttgaatacatccggcgcacagtgtcgcccttcattgccgggacactttcggcggtgattttagcgtgaccgatagccagccctttcaggccgtaggcggtcgcagtctcgccaaagccggacagcggaaaatcagcagtaggcagaatgttaatttccgccatgaatgcaaagcctgtttcacggttgcccaaaaacacgttttcatcacaaatgaaatctgagaaagcatcatcatatttcagttcatcgttgccttgcccgttttggaagccttttttgttgtaggcgtatttgctcactagcagggttgcaccgagatatttcgaggcctcctgtaaggttttccaaaaattagcatgagggaaggtattattctgaatcgacgttaacagaaaacggcggcccggaattaccttccagctttctacgctagaattaagctgaccagcggcaacggggcgggaatcctccaccgcaacacgttgggcgcgtttttcggccgcaggtttaacgggtttgttactatccagccaatcacaaatttcgctagaatgcttcgccgtcccgtaatgctctttgctcaattcgtcgcaaatttccagctttttagcacgcagacgtttcccccaaaaattcaggttatttgcggcggttaaaatagctttttgtttctcgagtgcaatgatcattatttaaattctccaattatgggatataggcaaaattgccaaatataacgccttattgctggtggcgttataatttgcgactctaaactattgccgggataatgctggcggatattccaaaagctaccgctagaataataaagattattgaccagcggcggcaaatattcgctttcttaaaccagaagtcacggcgtaataaatccgtttgttcgctgcctatttccatgaaattatagtatccatagagacaagcggcggcgaaaaagccagcgataagaattaaggattcagtagggaaaaagatcattttacaacctccttttcttctacgctgaaagcgtagttaagaaggtaaatttcgcgggaagataattccagcatttccggcttaaatacttcgcggttaatagccatcccgaaagtatccgcatcagggttaacccacaaaacaatatattcaggtactttaacgcttgggggcgtcataaccttattatcctgataacccgtttggattaattcatccacgacggttcccgttaatttaataacggagcctctaattaaagccattttatttctccagttatgggggacaaaatatttaattatgcgccccgctagggaggcgcattataattattctgccgactcttttacttcatcctgaacgccaaccatacgggcgataacgtccagttggtcgagcttcatttgttccaaacttgccaggccgtcggcatcttcaatcaggccgtcagcaatggcgtgctgagtgagaacgcgcacatagtgagctttacgcagggaggaaccgccgccgactttgcgcggcttatcagacttctgatagacctttgcgctaaccagtttagagcgtacctttacatgagattcagcgccaaccgcttttgcaatgtcaatcagaccttgcgagttagccacctccagaccatcggaagcaatgataccttcatacatagaaatggcggtagcggcgtttgtttcgttccatgcaaatttttcggttttagtagcagtcatgatacatctccagttttatttaagggtttaggctagaaagttagccgctatatattctagctagaatatataacgaaaactctttattttagttttcaatttaaagctatttaaagcggcattgtatatatacgctgcctttaataattacgctattacgtctatttcacgctatagattcgtgttaactcacaattgccgttcaaagcatgatataagttccagcacataagtttaatttgcgcaccataacattgcttgcgctgcatggaatatacatcggaagtctagcataggggaagcatcccattatttaccgggggttaaacttattggctgttaagcgacagccaaccacttatcatctttgcgaatgactttcaccacgtcgccggaatctacccggacgctataaagttttaaatcactgttttttgctttttccgtttcggcgtataccgcattaattttatcaaacgggatcatcgccgcccctttgatatatccgattttttcattttctcccggcttacttacgtcgccagtaacgaaaggaataaaaacggaatcaccgatcattggggttttaacgttttgcatgtttcttactccagtttagtttattgggttatccggttaacactctgatattttagagtgttaacagaaaactcaattacccttactgagagaatcgacttttccaaatttttaaagagcggtgttgcttattgagattctataataaagcgttatcggcagattgtcaaacgttattttgtaaagattttagataacgcatcatgttatcccaaatcatcggcaagccttgctggcctccgcgctggtaagaacggtaacgccgcgccatatcgcgctgcattttgaccaattccgagcttgccattttgttcaattttgctgccggtttagatgatattacaaagcgtttcatgttgtcaacctttaattagtggagtgtatgatttcgtttagtttgcataatgatttgaccgtctttatgaatgaaggctaaatctacgtcgtacacttctttataagtcttaatgaagtgttcagcatctgcaacggtgaattcgtttacaatctcgctactcattacgttttcttttaacatgttttcggtttccctataaagtaaagaagccgataacgctttttatagaatcccaaatttttaaagagcggggcgggatgttttccgccttgtagttcgttgttgccgtcctacgagataaataataggtcattccgacttttgaggcaagcggagaattgtaaagaagtgtaagtttatttagtgcggtacggccctttatttttggcgttttcggcctgagtcactaggcgcaagttgtcaatgaaattattgctagggttacgatcaatatgatcaattactagcagcctatctattttataatgaaacagtacccaaatcacacgatgcactaaataacgcttgttattaatagcaaccgaataataaccatcctcgcgttttgttcccgccacgccgtgaaacgtcttacccggcccgctaaccttccagcgtaaacagcttgggcttgtctcgtcatagtagacgttatcgagtacgtcatttacatctatatctaatgtttcaaagttcatttatatctcctgttatagtttcaagtgttactatattatatcaaatagtaggacagctaaccaaataagattttgcacgatagataggaagcgcgcgcacgtgacacaatatttaaagaaagtcaacgaatatttttactatttttcttcaaaaggggttgacaaaacctatttcacacgaggtgaggagatcgccccatacccggtatgattcatcggcttttatctaaaaccgcttagaatgcgttttagagcgttttagaccctgttaataacttatacaaaaagcaaaaatgaaatttaattagttatccactagacaaatgattatttttatgaaaacgcaaaataatgcttgcgtttattttatgctgtactcctgttttccgggcaagttatccacagcacaaaataacttgacaagctgagaagcggtataacgagatatccccagacttatccacaggttatcctactgtatatttatacagtatattccggcagcggtaatactctaatatgcctctagaacgctctataacgcattctgagcgctttaaatttagaagccatattaaaggccattgctagaggggcgcagaaaaacaaaaagcctgctcattataagcaggcttattattagttagctaactattccgtataggtaatgttatcatggtcagtaaatgaaacaggcgcttcttccgtccaccattcgtcccataacttagcagactcatgatttcgcaattcactaatagcaggcaaaatatcgcactcgtgattagtgataggggcggctaactttgcatactcctccggcgttaattccacctcatgagtaaggttaataaccctttgcgtgctaactaatacacgtatcttttccattatcgaaataccgtttcaattgtttcgccgctagagcataccgacccgccacgataaaacaggcgttcggttttatatttggttagcagatcatagagatccagatcatcggaaagcgggtaagattcccccagcgcggaaacggaaacaggtttacccgctaccagatcacggcaaatcagaatcagcaaaggccagctaatattgataggatctccacgcaatccgattttaagtgtagccacttcatcaatatgccttgcattctggcggctaacatattggatcacggtttccatcgttttatagtgagccagaaaatatttgttgacatagatgtaaatcataggtatacgaccccgctaaccttccaaccggattttaaaccttcctcaatatgaaggatagtttcagcatccgggatatagataaacgttttcaattcgcgcagattaataactgcctttccgtcagctatctggatgtaacccaaatagattgcccgctctagaacggaatgaaggggcgaaccaccattaacgaggttgcaggaatgaccgggccagtacatataaaacgacccttctaccccagcattacagtatttttcgtcgtcgtcctcatcatcccaatcatcctcgcctaacatactttcggcatgttcgcaagccttttcccaggaaagggaatcgacgtcaattccacgacctaaaaaatgaaggtcagtccagccagtaccgcaaacgttagtatcacatttgaggacagcggcgacctcctgagactcaattcgcccgccctctaaatataaaccttcatccgcttctaccgtacaattaatgcccggtacgcaagatttcatatgaaacatggtttttctccaataatgggggcggctagagatttagccgccgggaaggggattttacagcttatcgcggaaagtatcaagccggttgtttagctctttaatcgcgtcggcatggatttcgtcatacgttgacacgatatccgccagctcatccatagttagcgaactaacaataacggacgttttcacctccagcttttccggttccggttccgctggtggcgtatccaaaaacgtcagtgatcctaaattaattaggaatacttcgatttcggtagcgccggattcgcagtcgatttcaaagctactatcaccaatacagatatcaaagccatagccgtataccccgataatccgcaaggggattcccagcatatcatcggtatccgggtaacaatcccggcggtcaatctggcgagccagattatccaagttttttggctcgatgaaaatagcaaaattgccacgatcgccattctggcgcaggcgctgccatacattagcgatcgtcatcttttcgccttcaaaggtagcggttagccattccataacattctccatttagttagcagggtaattattatagcgccccattatagaggcgctagatataattattctgctacgtcgttttcaatcaggctagaaagattgacgccttttaatacctcgtcaatcatttcgcctacattgaaactttgtaccagttccaacatggcggcttgcattgcagcatccgccgcaatcaccgctttgcggttgttcggcgcatactggctaaccgcgaaattcagcaggttagcaattaccacacgacctaccgccgtgtcaacataaccgcgaaccataaacggcgctttgctggcggcgatgccggaaacttttttcaggacgatagaaccagcttccagtttagcagcgtttacagcagcgtttttgttagcggcaacgatagcggtagcggtagatttgatagtattcatttgtaatgctccagtctcaaaattattagggttaactacattttcagtaacagccggggcgacttcttccagctcgccatcataacgataatttccagtccttgccccttcttcgatttcgatatcgtagaagttacatggtaacaggatactcccatctttgtcaagcacaaaaatcatcatttcgctagagattcgtgctggtggtagttccagatgatcacacagatttttaacccatgcgcgggcatcagtgaaagcaagcagttcgctttcatggtagcaaaaacgtctcgacgcttgtttaccctcggacgctttatacaaataagcgtccgtagtagtagacactatcagatcaataggctggctgtcaaccaaatattgatcatcgtgataaataacaatcgccgcgccggggttggctagagcgtagtcacggcaatgctcaaaggcatagccggatctactttccatatttgcgcgataaacggccaaaatatgaccaatagaggcgcacttactaccatctaacaggttgcgagcgccaccgcgaaccatcggcaaattagcaacgggggtaaatttctgtaacattttctgttactcctttgtttggctgagaatctattatagcaagattcccagctttttagcaagtattattttctagaaacagataccacggccccggcctacctcatcccgattttcatcgaaaatgatcacattggcattgaacgtgctacggctaacgatcatttgaatgccatccttccccggttccggttccaccataaatccccatgtaccggaatctactgttacagaatcgaaatcctgattccgtaacactgctgaaacagttccctcttttgcaaaggttacagaaacacggcactcaataggccgaaccttttcaggggtaacgatagccggggcgctaacctccgcaagggcagcaccggaaagcatagcaaggccaaagccaacaatggcaagtttcataacattctccagttttaggggttgttcccgtttgagagattgcattatgcaggaatcagatctgattgtctaccactaaaaatagtagttgcttcctgctagagttatgttattattatgactccagacaaaggagatcgaaaaatgactttttctatgctggctttgggtttagttggttctatgatggttatgggcttcatcgctttttgcgggtatgccctctatgataccttgtttaataaggaggctttttaatgcgaactttacgcggtggtagtcccaaaagctgtagccacaatacttaccaattgaacgttattcgtgacggtcagaagaaaggcggtgacggtggcggcggtggtgagtggggttttcgtgtcatcatggttattattatgaccctagtctttttgcagagttgccaataatgagcggcctaatgtttttgggcgtgatagttattagcgcaatcattaccctgctaatagtttcagttgt

SEQ ID NO: 20 - DNA, 49754 bp, Unknown
  bacteriophage strain capable of infecting bacteria of the genus Klebsiella
gggtatgaagactggtatcaggaagcgctgaggaagtgggaagatgccgccgaagcgtcaatcaggaagctagcaagcgatatcgtttctgactggacaacgaaagttagaaccgccaacaacattggcaaatctcgcaagcagatcgatgaaataatcgaaggccgatacgccatttatggtagttggtctcgcaaccgggcaagcggaatcatcggaacttttaacagtatgttgatgatgcagcgcctgaaagatgctaaagtatcgcattacttttggttcgggatgatggacgaccgcgagcgcgagagccatatcaagctagaaggtaagcgacgccctgttaatggtgacggcattttccccggtgaagagtacggctgccgttgttgggcggttcctgattttaacaatgtagaggtatcatgatgaaaagagttcaaaggttcgacacggtaaagatgaaggcgcgattcgatgagaacggctttctggttgatactccgatcgtggcgcgtatcggtgcgcagacgtaccagacgccaaccgggccgcgcgtcgagttccgcccgcgttcggaggtgtttgatgctgaatcgctggcttcataccagggtaagccgatcactttgggtcacaagatggtgaatgcgcagaacgcaaaaggcctggtggtaggatcttgctccggcgctggcaaagaggacgggatcggggttcttgttccggtgatgatttacgatggtgagtcgatcgagcaagccaaaaagcgcgtagccgctgaattgtcagtcggttacacttcggtagatatcgaccgcaaaggctggggtaataacgcaactggcgaatattatttcgatgaagaccttccggaaaacttcgaggagatgaaaaacgattccgtctctgattgggttcgctttgatgcggtgcaaacgaagattcgcgtgaatcacgtcgcgcttgttttccgtggtcgtgccgggattgcgaaattaaatcttgatagcgaacaagaattcccctatgatgacgactcaaaccacaaaggagctaaaacaatgatcattaaaattgacggcgtagatgttgaagtggccgataacgtaggcgcttacattgccaaactagacgcgcaagttgcatcggcaaccagtcaggtaacgagcatcaccgcagagcgtgacgcacttcaggccaaagttgatggcattgaagatgaagtcgccgcccgcgttgctaaaatcaaagccgacgaagacgcaaaacagaaagttatcgcggttgtttctgccgctggcgtcaagtgtgacggcctggatgttaaggcaatgaaagttgcttacatcaaagaggttgacggtcgtgatctgtctgataaagaagattcgtacatcgacgcttcttttgactttatcgccaactctgataagatggctggcaatcgctccaaagtcttcggcaaaaaagaagatggcgagcaaaaagacaaaggcggcttaccgaaacttgacggcaccgaaatcatcgatccgcaggcaaaattccgccgctaataatttgcggccttcgggccgctaccagaccaaataaacaggagattcaaaatggcacagattccagcttcttattcccgcaagcgtgatattgctgtagcggggcagatcgctgatacgtcactttacaatatcgacggcacttgtgttgctgaaggcgatatcaaagctggcgtactggtggcttccactggcgcagtttccaatggccacaaggtcgttaagccagcaaccgcagcgagcgacgtcattgtaggcatcgcgcaattctcgcaagcctactcgccggaaggccagtatgacgacgaaagcgcagttaacgttatgactcatggccgcatttgggcgctcgctgacgccactgttacggaagaagattgcgcgttcggttctttcgtcacctttaccgcgactggcacggtggcgaagggtgatgccggggttatcaaaactggctacaaacacactggcgaatacaccaaaaacgcggatggcactatccttgtgaaagtgcaggtgcttgaaggcgcagtggccccggcggctgacgctggcgcataataaaatggtggggcttcggccccatttttgcaccagaaaaaaacctttgacggtttagcgattcgtgatattcttcatctcgttaagccaaatacacaaacaggagttttcagatgactatgaaattagatgcattcgaacagagtgctattaaggtcgcgatgcagagcatgggcgtagacgccgcaaaactggatgcttacggtatctggactgttaagcagatgactcaattactgaatcgccagtatgagcaggcatacccgcagaccagcgcacttgagcttttcccggtaactaccgagatctcgccgaccgcccgccgctttgagtggctcgaattcgatggcgtaacttctgcgaaaattatcgccgattacaccgacgacctgccgaccgttgaggcgatggcgcaagagaaatcagggaaagttttccgcctgggtaacgcgtggtttatttccatcgacgaaattaaaaccggggcagcgctgggttccagcctgagcgaccgcaaagcaactctggcccgcgaaggtcatgagacgctcgtaaacgatctggtgttcaaaggctccgctcctcacggcatcgtgagcatcttcgaccagccgaacattaaccgcatggtttctactggctggggtgatgatgcggctgcggctgaaaaagcattcgaagaaatcgaagacctgctaaacctgatcgaagaaactacgctgggccgccatcacgcgaccaacatcgtgattcctccgtctaagcgtcgtcttctgacgaaaaagatgccggacactagcggcgactcttatctgacctggttcaccaagaaccatccgggcatcaccattacggcgatggcggaactggaagatatcgacggcgcaggcaccaaaggcgtgctggcatacgagaaagacccgatgaacatgagtatcgagattccggaacgctttaacatgcttccgatgcagcctaaagacctgcatttcaaagtgccgtgtacatccaaatgcactggtctcatcgtttatcgaccgctgaccatcgcaatcctcaccgggatcgagaaggcggcgtaacaaatcaaagcgccttcgggcgctttttaacttaataaggaacgtaaaatgagcatcaaaaaagttagtctatcagcaaaaaccgttaacaatgattcagactttcaaagtttgattttggccgggaaggctgaaggaatgttttttcacagcgccatgtttcgtgatggtgggagcagtgatagcgtaaggcttgtaatgtgcgacgttgaaaggtggaaggatcttaaattcatcccggccggaaataatgatgtaacattcgttagcaacgttaatgagcttttaaaatccggtgagtatgattcgatcattgattttcatctcccgcctggcacgtggcatggttatgccatccttggcaatgaggtgaaaaacgatttgccaaaacaaaacgaatatgctgtaatcaaactcacacgttcagaagaaatcacagagtttgcaaaatcacagcttgataaggagcattaacaatggccagtaaaaaagaaaccgtagaaacagcagaaatcaccaatgcagaacaggcgccgcaggttgttcaactgcaaaacgttggtgcatgtgcaattcgctataaaggcaaaaattacgtctatgagcaggtttttgaagtaccggaaaacgaaatcgaccgcttccgccacgaaatcttcaaaggccgcgtcgagttctacgacaatccgaaacgcacgcgcgaatacatcgcagcagtgaaggcgaaagcgaaagagatcgtgcagcctaaaagcgcggaataacaaaaaccaacaaagggcgcttcggcgccctttttcatatcaggagatcgaccatgagttacacaattcaagatgtgatcgataaaatgcgcagccttgcacctccgcttaaagaagttccagatgaactgctgtctgcgtgggttgtgcttgccgaagagttcgtttgcaaatccaggttcggggattccatcgttacggcgatcgcattgatgaccatgcacctaatgtttttggatggtgcgatgaagcaagaaggcgaaaccctggagtcttacacgcagcgagtggcatcgttcaccctgaccggggagttttcccaaaccttcgatcgcgtgtcggcgtcaagcgataacgaaatgctttctacgccgtggggcaaaatgtactggcgtatgctcaagatgcgcggtggtggcttcggcctgcttaccgctggcaacgttcggcgctgcggaattgggaggtaatcgcaatgaactacaaagcaatccaggcacgagcaagcgcgggcattaagttcttcagcgacgctgacggcgtgttcaacaagtacacgaaaggcgctggcggtggcatcgacccggaaaccggggaggatatcattcccggcgaagtggttacgacaatcaaaggggcgatcagagatgtaaatgatcgtgatatcaatggcgaaaccatcctcgctggcgacaagcgcgggttcttcactcacgacgtgccaatcatggaaggtgacgagatcgacgtcgacggggagcgctatcgcgtggttaatgcccgcccggtgaaaccaacgggaaccgtcgttgcttaccgtccagttttgcgcagggtggcgacttatggctaattacactatcagtgaattcacaggcgcaattgatgcatggtgcaaggcggctggtgacgcgctggaggacgtcgttaggtttacgtgtgaagatattcaccgcgaccttgtaatgcgttctccggtggatacagggcgcttccgtggtaactggcaaatcacctttaaccgtgccgcgctttacgcgattaacgcatacgaccaaacgggcgaaaagacaatccagaacggtaacgccaacattgcactatacgcaaaaggggccgggattacttcgatctggttcagtaacatgctaatctatgcgaacgcgctggaatacggccattcaaagcaggctcccaatggcgttatgggcgttgttgcgatccggctgggcgtttatgttactgaagcaatcaagcgagcgagggcgaaaaatgcattatgagatggcgttaaaatgcaaggcggcagtggctaaatttgccgccgacaacgggttaaaggtcgcaggagataacgttgactttatccctccgaaaggcggggaaacctaccttaaagtctcctacgtcgaggcggattcaagatcggttgacctgtcaaggaaatgccgagtctatctggcgatggttcagattgacgttatctttaagccggggatcggaaccgactccgcaaggctcgttgcgcaaaacgttgcaaaatatttccctgaaggtaaaatcattgactctgttaatgaagtttatgtgagcgaatgggcggaagtttccggcgtgcagaagcatgaaacaggctggttcttcccggttcgattcacagtaagatgcgagagcgtggaggaaaacggttatgcacctgcctaatgggagcaagatttttattgaggccagcaacgagagggagtacaattttaagtggcttgacacacttgatgttggcatcccaaacacttatgttctcgtattgaatcaggcggctggtgtcagcgcttttggtgttggcgatatcgtagtaatcaccgagtgcgacaacaagctgatcgagggtaatgtatactcgatccgctctgttaatggggatgtttcgaggattagggtatggccggagtaccgagccaatgatttgccagttggtcagtacattatatcgccaggaaaggttcgtcgcatttcatcctgggcggaactgccttgcgtgcagtcaatcgacaaggaaggaaacgagcaaaactggtatacttaccagtgccttgacagcggaagggaggagcggcagaagacgacaaaatcagcgctgtttatgtcttatacaatggctcacgattcggggaatccggcgtatgatatcatgaaagcacatgagcgagataagtcattaatggctatgtatatgcatatcccaagagcaaaggaaaaccgctattggtctggtaacgtctcgttcgatgacattccgtcaacgacggtaaacgaaatggagacagtggcgctacgcatggcgattcgaggcgcttataatttcttgccatccagctaactagcgggcataatggcgttgttaaactttcatcaaaacaggagtattcaacatgcatttaccaaacggtgcaaaggtcttctttgagaaggctcgcggtgcggaggttccgtttaccgcaatgaccaacgacgcgaaaaacccaaaaatcacggtggcagatggtgcgctcgacgttaacgatatcgtaatctttaccgattgcacctggagcgactttgtaaataaggtggcccgcgtcaagtcggtatcggctggtgtggcaactctggaagagttcgacacctccgacaccaacaaatatcctacggctgcaaccggaagcgtgagcgtcgtcactgactggatcgagttgccttgtattcaggatttgggcaaagacggcaacgaacagcagtattataactaccagtgcctgagcgatgagcgcgaacagtccgagcctacctataaatcggcggtgacgcttaactacacgtttgcgcatgagtacgataacgcaatctacccggtgttgcgtgcagcagacgccagcaaagaggcgaaagcgatgtacatgtatatcccgcgagcgtccgaggttcgttattggtctggtgctgcatcattcgatgacattccgactacggctgtcaacgagatggaaacggtaacgcttgatattgcactcaagggtacgcacgtcttccttccggtggtcgcttaattaactggcggggcttgtgcctcgcctttttttgtgcataatagcgaataacacaaaccaatcaggagttaacaaaatggctaagttcaaaattcaaattggcggcaacctcccttccttcaaactgcccgtaactttcacttgcccggatggcaaagaagcaaccatcaccatgaccgtaaaacaccgctccaccgatgagatgaaagacttttatgagagcgaagataaagcgccaaagggtaacgccgagtttatccgcttcatggctgaaggttgggatctggatgacgaattcagcgatgaaaacatttcctggctttgcgctcacttcccggcgttcgtcatggcactgccacaaacttacatggccgcgcttgcgggacaccgtgcaaaagtttaaggcgggctgtttatctcacgcttcagcctgagctaaccgatcgccagcttgcggagtacgggttaaggcgatcggactatgaagcagatcttgaaacgatctattttgatgaacagaccgcccaaagctggcagctattccaggccatgcaaacgcaatggcgaatcgggatgaatggcccgacggggcttgactataatacgttgcctatgctgttcgaattgtataaaatcgacaatcgagaagcggcattacttgacttgcagatcctagagggtgaatacctgaaggagatttacaagaaatcaaaataagcgcctacgggcgcttttttcatatgggggctaaacatggctgataaagtagctgggttgacgtttggcgttgacgtttcgcaggttgatagagcggtacgatcactcgctgaactgaagaaccaaagccagcaaacgggcgctggcctacagtcgctcgctgacgctgaaaggcgggccacggcgcagaccgaggaaatgaaccgcgcattgcagcgccagaagcaagagactgacaaatcaaaaaccagctttagcaggatcgcaagcgccatcgatcccacgatctcaaaaatggcaaacttgcgcaaagcgacggaagaacttgataaagcatgggctttggggcttgttccggataaggaatttttccgcctgggcgctatcatcgaatctactaccaaccaactccggcggcagcaggcggcgctaactgaagaaggtcgcgcagcaatcgcagaggcggaggcaaagcagaaggcggcaaacgccgggcgtgattttgtcgccagcttgaagcagcaagcagactcgatcggaaagactcgcgccgaactgctggaaatgaaggcggcgcaattgggcgtatctgcggaagcggccccgttcattaacgcgctgaaacagcaagagcaggcattaaagaaacagcaaaacgctatgggccttgctggcatttctgccgggcaatataaaatggccatgcgccagttaccgatgcagatcactgacattgtaacgtcgcttgcttcaggtatgccaatctggctggttgcggtgcagcagggcgggcaaatcaaggatagcttcggcggcttgagcaatacgtttaaggtgttgttgagctacatcaacccgctaaccgttggcgctgcgtcgttgggtatcgcgctggcagcaatcgctaaagctggttatgactcctggaaagcgcaacgagaactggcgaatgcgctggtgctgactggtggctatgctgcgacaactaccgggcagatcacagccttaaccgaagagattaacaaaaactcatcggccacgattggcagcattcaggaaatcgcaacatcgctcgctagttctggtaagtacaccatcaaccagattaagcagatcacgaagactacggcggaatggtcggcgcagactggagaaagcgagaagacgatcacagggtactttgacgccatcgtaaaagaccccgttaagggtcttgccgatctcaatgaacgttttaatttcctggaagaaggccagctaacctacatcgaatctttgcgtaaaaccaaaggcgagacggcagcagcagatgcggcgacaaaactgtttgctgatacgatggacaagcgccttaaagatatcgctgacagcgcaacgccgctcgaaacgatgtggacggatattaaaaaatgggcggctgactcgtggaagtgggtaggcgatcacacggtaggggcgctaaaccttatcgttgacactgtatccgcgatcatcaacacgatcagaaagctgattgccgacggcgacgccatgatcgcgcaatttatcgttgacgctggccgacagcttcagaaagtccccggcatgggagactttgggaatgactttcttgcgcagcaggaacagttaatcaaagactcgaaagccaaatccgcagagcttgcaaaaaccatcgcggagcagcaagcaaggatcgctaaaggagagatggggtacattgacgccgcgaaggataaaaccctttccggtgggtacagcagcaaaacgaaggatcgcgtaaatcaggaagaaaaagatatcctgaaaaaccgcaacgccaggaagcagcaggtagacgcgggcgttaaaattgatgagcagtatcaggctgaactgctatcgctacaggcgcagctaaaggttttgcagcagcacaaagggcttgacgacaagatcagccagcagcgcaaagactacttcgagacggttgctaaattccaggttttggaagaggcaagccagaagcgaaaactgacccaaagcgaacagcagatgctggcgaacaaaaagaatatcctgtacatggcagagcaaaaggccattgtgggagatcagattgttcagcagcagcgactgaacgccttgcttgacaagtcgaccaagtatcaaaaccagatggcggagaaaaccaaagcgctacaggataccgccggaatgggtagcaaggagcaggagagataccgggccaatgcgcagatggcggctgactggaaaaacaacggcggatctttaagtgaccctggatttaaagcgatgcaggccgcaagcgataaattctacgcacagcaagatgcgcaaatgatgaactggaaggccgggtttactcacgcgtgggctgacattggcgacgaagttaatgacgtatacaccaacatcggggatattactaaaaacgcatttagcggaatggcgagcgtgctgactgattttgtcatgactggtaaggccagctttagcgactttgcaaagagcgtgatcactgacattaccaacatgcttatcaagatggcgctgtttaactcgctttctgctgcgtttggtggtggtggcggcacgttcagcttcgccaacatgttcagcaagggattttccggcggtggttacactggcgacggcgggaagtatgagccaaaaggcgttgttcacggcggggaattcgtattcaccaaagaggcgacgcaaaggttaggcccggaaaacctgtaccgactcatgcgcggctatgcaagtggcggcctggttggcggtaacgcaagttcaggatctggaatcaccaacggcggcaatgttgcggcgtcggctgcgatggtgttcactatcggtgacattaacattacgatgggttccggtcaggatagcaagggcttagagcagggagtaaggcagatcgtgaatgatatgttcacggaggccttgagccaaaacgggcgcattgcgaagttcgtcaatgagaaaacgaggagttaacagtggattcttttacttggtgtactcaaattcaaggaggggcggcgaaggtcgccgtctccaacaacgttcgatcgatcagctttggaaatggctacatccaaacggcgtcgagtggcattaacacaaagcgccggacggtttcgatcgtttatggtgggtcggattgggaggcggtttatgacttctgccaggagcacgtaaccactccgtttgtatggacggctccggatggaagggcgggcgtatttatcgtaactgccgattccgttaaccttgcgccgcaaggtggggggatgtttgaggtcacggcggaattcgccgaacgcttcacttcagccggataatcaaaaagcgccctttacgggtgcttttttttggcctatgatctggagtcaaatagaggagggcttacgatgacagccaatgtttcaaaagagtttgcaaactgcttacaaaaacttttccccggcgagatcctaacgctgattgatattgacgccacaaagttcggtggtcaggtctaccgattccataacgagaacgtcgcctatacaaccgaggagcttttagcagcggtgaacggcgggacgcttcagcccaagatgatcacgtttcgcggcgagcaatatggcccgcgcccgttcggcctgggcgggatcgcaatgtcgagtgatggcacggtggaaaagccgacgctgacggttagcaatattgatgcgcaagcgagtgctcttattcgagcctataacggccttatgcaagcgaaggttacggtgtgggttttggtcaaggatttgctaaacgtcgacggcagcgttaatgagggcgattttaggcgatttgtttactacatcgagcgcccaaaacaagtcgacccgcaaaaggcaacattcgaattaacatccgtttttgatatggatggattgatgatcccggcccgcctaacgcaaaccgtttgttattgggcgcagcgtggatggtataagtcaggcaacggctgcgactacaacgggaagaatggatacttcgacaagttaggaaacagtgttgacgacccggcgcaagatgtttgcggtggcctggtgtcttcttgcaggcttcgctttggtagtgagccgttgagttttggcggttgtgcgacagcaacgttaaagagtggtagctaatatgttaactccaaaaattaaaatgcagatcatgcagcacgcgaaggaagtctacccgcacgaatgcgctgggctggtaacgcagaaatcacgcgtgcaaaaatatcaccgactcgacaatgtttcgccagatcctgagaacgagtcaatgccggacgaaacgcagtatgcgttggcgtcactggaaggcgagccgatcgccttcgttcactcccacactggcgacggggcaaccaccgttccgagcgccacagatttatgcttctgtgatgaatctggcttgtcgtgggttatcgtctccatcccggaaggcgatatgcgaatcattgagccgaaacgccgtccgctgattggtcgaccctgggcgctgggggcttacgattgctatggccttattatggattttcacaagcgccacggcgtcacgctaaaagatcggcgggttccgttcgaatggtggaagccggaatacaaagagaatctttaccaggactactggcaagaggacgggttcattgaaaacactggagagcctgaagttggcgatatgatcatttttcagcttcaggcggagaagtggaatcacgcggggatttacgttggaaataacaacatccttcatcacgcatatggcaagctgtctcgccgggatatctattctggatggtacgagcagcataaggttttaatttgcaggcacaaggagcttaaacatggcatcacatacaaagacgattaaactttctggttccctggggcgtcggttcggcgtattccacaaacttgcggttgattcggttgctgaatgtatccgggcgctgtcttaccaggtggaagggtttaagcctttcatgcagagcaaagttggttcaaacatgcgcttcggcatcatcgcagacggaaaaccaatcagcacgaacgactttgcgactttcgccgtggccagggagattcgaatcatcccgatcccaaaagccagaaagaacggcgggttgttgcaggtcgttatcggggcggcgattatggttgcggccttctttactggtggcggttcgctggcggctatgggcgctttttcgtcggcggcttttatggctggtggctcaatggttttgggtggcgtaatgcagatgatcgccccgcagatgggcggcaacatgcgggcgagcgaatcacctgagaataaaccatcctatgcgttcggcgggccgattaacaccacggcggcggggtatccaatccagttaccatacggttacagattggctggcggcgcgttgttcggttcgggatcttacgcagaagacaacaactaattaagccattcgctttttggcctgggggcatagcctccgggccttttgtcgtgtacaattgcgagactattaacaggaggctaaacgatgactaatatcaaggcccggaagggtggctcaagttctacgcgtaccccggtagaaatgccagataacctgatctcaaaagataagatcaagttattgcttgctgtttcggatggcgaggtggttaacgacttcagcctgaagcagttgcattttggcggcgtcccggttcagaacgaggatggaacttacaactacgaaggtgtgattgctgagttccgccccggcacgcaaacgcaggattatatccagggcttcagcgagtcaagcgctgaattccaggtttctcgcgacgttacttacaatactccgtacacgcttaccgtatcgaacaaaaatctgtctgctattcgcttccgcctgttatggccgcgcgtgcttactcaaaaagataatggcgatatggtcggatcggttgttgagtacaagatcgagatggcggtagacggcgcaagttatcagacctacctaactggcaagattgacggcaagaacacgactggcggttacgatcggagtattcgcgttaacctgccgcaagacttcacgtcgcaggtgcttatccgcgtaagccgagtaacgccggacgctgacggggtgaaggttgtcgacgctttccaggttgaatcctatgctgaagttattgatgcaaaattccgctacccgttaacggccatgctttacgttgagttcgatagcgatctgttccagaaccagatccccaccatctcactcaaaaagaaatggaagattatccaggttccgagcaactacgatccgattaatcgcacgtactccggaacgtgggacggtgttttcaagtgggcgtggagcaataacccggcctgggtgctttatgaccttatcatgaatcagcgctatggcttagaccagcgtgagttaggaatcccggttgataagtggtcgctgtacgaggtggcgcaatactgtgatgagcttgtgccggacaatcgcggcgggatggaaccgcgctatttgatggatgtagttgttcagtcgcaggtcgaggcgttccagttggtaagggatatttgttccgcgttccgtggaatgacgttctacaacggtgaaagcctttcgattatcgtcgacaagccgcgtgatccggtgtacctgtttacggctgataacgtcgttgatggcgtgttcgttcggacgttcccaagcgaaaagacgatgtatacatcgtgcaacgtcatgttcgacgacgaagaaaaccagtacgaacaggatattgaaccagtattcaacccggacgcagccatgcgatttggccataacccaacgagcattacagcgatcggatgcaccagaaggacggaggcgaaccgccgtgggcgttggattctgcaaacgaacctaagcgccacaaccgtttcgttttctactggcctggaaggcatgatcccttcttgcggcgatgtgatttacgttgcagatccgcactggcaatcagcctttaacctggtgctatcaggacgcgttatggaagtatcaggcgtgcaggtctttctggcctaccgctgcgacgcaaaggctggcgacactctgatcctgaataccgacgacggcaagccagtgcgccgcacaatcgccagcgtttcggcagatggcaaaaccatcacgctaaacgtcggatataactttgacgttgcgcctgacagcgtgttcctgatcgaaagtgatcagcttgcggcggaacagtatgtagtaaccaggatcgaaaagggtagtgatgacgacgaattcacctttgccatcacggctacgcagtacaacccgaacaagtatgacgcgatcgacaacggagtaattaccgacgaccgaccaacttcggttgttgacccggattcaatgggcgctccgacaggcttaacgattagttcattttcccgcattgttcaggggatgagcgtcgaaacgatggtgatcggctggtctgccgtgcagtatgcaaaactgtacgaagtgcaatggcgcaaggatggcggtaactggaacaacgttccgcgcactgcaacaacgcaggttgatattgaaggcatctatgctggtgagtatcaggcccgcgtaaggtgcattagcggcgggaatgtagcgtctccgtggtctgcattggcaaccgccacactgaccgggaaagtcggagcgccaaaaggcccgattaacctttttgcgtctgacaatgagatctttggcattcgcgttaagtgggctatgccagaaggggcggaagacacggcatacattgagctttaccagtcgcaaagcggaaccgatcaggatgcaagcctgcttacactgattccttacccggcggctgaatactggcactcaattttgcccgctggctacgtgaacttctataaggctcgaagcgtagaccggatcggcaacgtttcaccttggactgattacgctcgcggtatgtcgtcgacagatgttaacatcatcacggatgcgattctggatgaaatcctggacagcgacgcgatgaaggagctacaggaaagcgcacaggatagcgcggcaaaactcaatgactacgcgaacagcatcattcaaaatgcgctggcgaatgatgcagatgttaggcgaatgacgaaggagaacggtaagcggaaggcagagatcgcgcatactacggtgctgattgccaacgaatcagaagcgagggcggctgaaattacggagcttaaaacgcagattgatgaagatatcacatcgcagattacgatccttaatgaagcgctggcggatgagagcgaaacgagggcaacgcaaattaaccaattgcaaacgcaatttggcgaggatatggccgccgggttcgcgcaggttaacgaagctatcgcaaacgagagcgaggcgagggcaacatccgaagcggcactagatgccaaaatcgggcaaaactccgccgcgctagatcagaaactcgactcgtgggcaaatgttgatggcgttggctccatgtattctatgaagctgggcctgaagtacaacggacaggaatataattccgggatggccctacagcttaccgcgcaagggagcagcgttgtttcgcaggttctgttcattgctgatagatttgctatcatccgtaatgcggcatccggcgcgtacacgctaccgtttgttgtgcagaatgaccaggtgttcatgaataacgcccttattcaggatggctcaatcactaacgcgaagatcggtaacgtcattcagtccaacaactttcaaacggacgttgcgggctggcagcttgataaaaatggcgtctttgtcaactatggttcaacctctggcgaaggttccatcaagcaaactaaccagaacattacggttcgagatggtagcggccgcgttcgttgtcagttggggagaatcactggaacatggtaagattaacgccgggagaaatcccggcttaaccaatggaggtattttatggcttatggttttcaatcctgggatgcgaacggcaaccccaacaactatgggatcgtccctgtttcggttgctggatatattgcattggcgcaagatcagaaaagcggaacatggtcttacaacgtcccacccggtttaaggttgggtttcttttgggtcgcaaaccaagaccaatacggcacatcaaagagaaggattaccgttagcggtaatcagatcgttgtttcagatgcgccagatgatgcgctggaatcaggcgtctacccggcgacgcaaggttttattgtcgttcaaattatgagttgaagattatggcagattacggaattttacttaccaatgatagcggcaatgtttgggtttctcctcaaagcatcccactggcactgctatcaaagcaaagcattaccctaaagggcgggactaattccgatgaagtaagatcggttacttacgacacgaatcacccatgcgttccgttcgtggtctttcatagctcatcaccacaaggtgcattcacaaaaatcaagtacgacggaaacacttgcagcgttgttttttccgctggatcacaaggagtatatgcggaagtttattttttcgccgtgttcccacaatcaaatcctggctatggccttgcgatttgggatgaaaacggcacgctgatcttgaccaatgagaccaggacgctttcagacgtgcagacctacgggactggatttaatctaaacgtcactaacggcgggaagtgggcggttagtcctgttcagttaggtgcgatcgttggtgttattcgcgatccgtacccaagaccatttcagggcgactatggcgcagcggcattttttaacggatcaagtacacaacttaccgcatatctaacgcaggctcctggcggaacggccagcgatctcacctacgtcgatatgaaaaatacctgcattgctattgattgctcaagatacgactaaaaataaaggggccattcggccccttttttacatacctaatttatcctcaattgcggataatctcgcttcgaatcccttcgcgataaacatgtttaattcatcgagtcggaacgaataacggtcgccagccggaaccactttgtagatcgggttctctgtgccgtcctctttcgccgggccgtagtggtcaacaacggttgtttcttcccacttgtcgtaacagatgaaggaataatcgaacggcgttaaaccgtgactttccataatttccattacgcgctgtaccgttaacccgcagtgctcgcgaacgttgttcaggtctgattgctccttccacgcccaaaaaccgatctccttcgcaatatccttcgccgcttcaatctcgttttcctccatctttctaacgggggttttaagccttgcatccgaagtttgaatagccccattgacagcgtaaaccgcttttacccttaggctaccggaaccaatatcaactgagttatcagttgatggagccaaagagccgccagcgccgattgaccagcgaggcgttcgggtaatcgatcctacagcgcaagtctcaaaaaacaactgcgtaggagttgatgttttaccccacccctctggagccgatacacgaacagcaccgcgcatgctatcaaacttttccccatcatatccgctcgcaccaaaatagaacgaggagttagcttgcacagcgccgacgtacttgtcagagtttccgaggttcccatcgcaccacattgcgcgaattgctggcgatgatgtggcggaaccacgcggcgcgatcatgttaatttcaggcgcttctccgcccacaatcttcaaccctcgcccgtcctggttggtcggagcattaaacgccggaacggcagcatttaaagattcaaaacttctaacctcgttaagagatgaatgcatcgaaccgtctggaacaatccaaacatcgccattatctgacagcctgaacgccggaaccctatcgctaatcgtcttacctttaggggtgacaagtaagcgaatccacccgccgtgattggtttcagacgtatcgccagcgccaaggaaatgcaaggccgcgttactgtgctccgtgtattcagatcccaaccacgggcgagaaccataaccacctaaaagctgattgttctttgttacgctattggacgcccctcgcgcatagttatggaacacggcggaaccgccagcagtgttctcaatcccgaaagagcattccgttgcgttgtcgccgataaagttaacaccaatcccggttgttgcggtcgtttccttcaatggcaagccctgagacgcggtaacatcaacgccgccgcgaaggtcggatgcaccattgacgcgtagcgtgcttgacattgtgacggcattactaaagctggcgttcaacccggtaacagtaaagttagttgcatcaaaaacaacctgctttgcgctattcagatcaccattagggcggaagtacattccttggccaccttcagggattgaatacacgatcgcattgctgttattggccctaactacgcaaccgttcagggtcagcgtagcgtttccgccaggtacgctgatcgcttgcggctggctgaacgtgttagctacgttggtgcgcgggatcgtgctatcgttagccatcaaataatcagacggtgaattatatacaatcccggctggctccgtggtaatccacgaataaccagtgcgatcgatgatcggcccggtaatcaacccattgttagattgcacgttcaaacggtttaaccacataacgggaaagtaaccgttaggcgagagcaaataaacatcaaaagatccgtcagtattttgcacaacccccaacttcaaacgtgatgtgctattggctgcggcaatcagtgcgcactgagtaaagttggcgtcaatattattactggttagcgtatcaggaagaccccggccagaaatagaaaagatatcgatcgggagattcgccgaaccgaagttagcgccgccaccaataataaattgcgcaaaacagtttgactgtccagcgtttttaacgttggcaatcttcatccacgcccgcgagctacctggcgaggttggcagcttatccggcgcttgaacgccagccacaagatcgacagcctggttataaagatcttgtgtctgccccttcgccgtttgtgcatcggtcttcgcagagttagccgcattttctgacgctttggcgttggtctctgaagttttcgccgccccttctgacgcagcagccgccgacgcgctcgcgtccgccgcttcggaatcagcccttacctgatcggcaagactttgcagagcttcgaaatcgaagttcttaaagaagtcgacagcatccgcaatttgagtttcttgcgactggtagtagcgcagagtttccgcaacatcttgcgccagtccgtcaacggtcaacgagtcgcttaacaggatcgcgtagtcagtagacgctacgacagcgccgtttgtggtaattgctttaatttccgtgtcactgaccaccttgtttacgacggccatttgaatcggtgacgacaaaaacataatcgtcgcaccagggcgaatcagcgaaagcgatgattgccattttgtgccagtcccggtaacggttccatctgcggccatagccgctttgccttctctgtatagtgccatgttttaagcctcttatgttgattgagtaacgcagataatagcatcaatgaaccgataaaaaaaggagcctttcggctcctttagttgtcaaattagaacgggatatcatcgtcgaaatccatccccggattcccgccgctgttttgcggtttaggcgcttgctgcggcttgggttgttgaggctggccccacccggattgctgattgccaccgccgctttgcgcaggatcgcgctggctgaattcgagttgcggcataatcatttcattgtggctgtaaattgtgccgttgtgctcgcggttcacgatctgaagcgttcggcaggtgacgctaatcaccttatccatttgcagcgcttcatcgtaccacttaatcatattttctttggcaaagaaaacagcgcggtagttcgtataaaccgtttcgtcctggccatcacgattgcggatcttcattcgctccgacaggtctacggcgtacattttccacggcccgttattgttgctgccttccttgacataaggttcctttcggataacacctgttacaacatgcattgttgttcctatggggcggtttcccgcccggttaagttagttgaaagatgaaatatcttgtgcttctggttcaggttttgattctaccttttccggctcacgtttcgcaacctcttgcggtttaccaggattgaagccgtttgccggggtgactttcagttccgcctggcgcttggtgatatcgtcttccgtcatcttccattccgcaggcgttaacgtttgtttcgccagcttatagatctcacggagcgattcgagatcttcgcacgcgtcaatgcgttttttgaagtctttcggcgtcatcttcgtaatttctgcatcatcatccgcctgcttgataccgagcgctgcggccagcgcataacggcgggcgtaagatgttgttgagccgtatgcttgttcgacggttttactgatcggcatattgtactgaaacgccatgaactcgccgctttcatgcaaaaacatagtttcgaggtgcatcaccttttcggtgctcgtatccatcatggattgaatgaccataattttgttcttctcaagcgccggggaaatcgcgtcgaggatatccccaagatttgcataggtgttcccaaggtggttgttcttcccgcttttcttcgcggcaacgaagccagattttgctttgattaatgcggctgcaatggtggtgaatttttcagatgtacgcatgataaagtttccttttcctgattggtaatgcgcactatatcacaagtgcgcaccagtgtttagctatttgtgccgtatacgtccgggaacatgtatttcacaaactgcggggtcggcaaaacaacttccgccgcgtttgactcgtatgatggccatgaatcgtgcttcacgcattccgcatactgatgaatcacgctttgatactgcttgcgaccgatctcgatctgctggctggtcagggtgaacgccagcggagcaaacggtgattttttctcctgcgttagcagtctgacaactaccgggcgtttttcgttgtaggtcttcacaaacagatcgcgctgcaatgccatcttgagatagtagcccaaattgaaggcgagtcgcccaaattcgtccggcttggaagattgagtggttttgtaatctgtgatcaccacgacctcgaaaacttcatcctggttgaacccccactccttgatgagttcgggatcggaaactacgtcaacatgatcgagtcgaaccttaaccttgacgccgaagatctcaccgaagattgacaattcacgctgtgcggtaggcgattcgatacatgcggcgtgtcgcgggttggccagcatcacgctgcgcatttgaacaacggcatcgaaatcaacatccttaaccagcttgcgcccggagttcatcgcggcgctttcgtcgcaaagttcaatcgcccaccaaacatttacgtcaatcccggcgcgatatgccatttccagaagttccgggtaatccttgttggacgtcccaatcaggccacacgctttcagcttcgcagacagtgccgacttcgacgtaatcagatctttaacctcgcccggagaagtcgcccgcaggtactcgccattaaattttgccgtctcaagcatacaggtatgcgaacaggttccgaacgccagcgcggcggtttcctcacgcaccttgtatttccagtgcgccggggatgttgcgtaaatctcgccgaggcttgagccgctaacgtattccgcgcaccaggaatcaggatcgtgatattgctcgttagtcaattcactgctggtgtatgccctgaaaattgcttcagccattgatattgctccatttgtggtttcgttgcgttaagtatacgcatgacgattcccggcgcaagtcaaaaagtgctatccgcagttggtcaaaaaatgagcgaaatttacgtaagatttagtaagatgcatcttacgtgattttttccatacatttcatagagttaatgcaaatcggtaagatggtgagatccctataggtaaatatccatgaaaaatctggcgcgaaatccagcgaaaaaagacacgcaccccggagaaatcttaccaagattgatagatacagatagagtaataataataatattgttatttatcatatacttactatctatatattgcggttaattggttaaattttgcgcgaaatttacgtaagattcatcttactaaatcttgcctaaagtggttcgaccagttgcaagctactgaatttcaggcataaaaaaaggtaagactgattttctcaatcttacctaaattctggtcaatatttaatcagagaagagatgatgccttgtataacttacgctcaaagccgagcttgaagttgtcaccgttcggaacgataacctttagatcccgatcgtcggcagccgccagcatatcccgatctccacgacggcaaactacccgcatttctcgcttaccttctccgcccttgcctttatacctgtacgccacgatctcgacgtttgaaggtatgatgcaggcccaaacgtcgcacttgaacgaactggcaatattgaagtgcatcgcctcaatccaggatcgagcaaggtaaatcggcccgttaccgtcgtcgctctgattggtcactatcaccgatccgaaggtcagatcgccagctaacatcttctcccggccttcttcatcaatgaacaggatattgcaatattcatcatccagcccatcttcatgcacgagttgcattggtagcgcgtgaattagctcctgtctgccgttctcgtgggtttttacgccaacctgatatgatttgacatgctcgttttcaatgccctcatagagcgttacaggcgtgctatcgacggcctccgttctgtttaaaactgccagcactctttcatgatctgccatcttgccgtagtcatacccgttatcacgagctacctgcttgtttctcttgaccacgtattcttgcggaacttttccgagatagcgcccaagaatgttgatacattcgctatacggctggccgcttaacttcatcaaccagccgatccccttatcagcaccgcagccgccacagtatgcgccgccgtcgccgcgcgtttctaacttatcagtccagcggaatcggtctttgccgccgcagttcggacagtcctggtgttttccgttgaaatagcgggagtgaatgccgcaaatgttctgcaacgcttcgcgccacataccagccatgtacggcaaaacctctttttcatcgtaaaaatccacgtcgtaacctccaaataaaaaacgcctacacgagaatgataacccggcaggcgtttagtgtttagtcaaattgtgctatcggactacgcggagcatttcgcggcggtcgcatcggcgcgtcactggcttgccgttgctgtcaaatcttaaatcaggtcggcagaatgaggcccggaaacctttgcaattgttccggcggtagctcttgtgtacgagataagcgccatctgctgagatcatgccgcgcttacgccactgctgaacaacctggatactaactcccaactcttttgccgttccagcgacgccgccaaaggcatcaataaccaactccatccgcgcagtcaacccggcgcgaacctcatccttcagcacgtagtaaccagtcggtcgcttgcgtttcttcttgtctttcccgcgcgacgttccgttgttgccgttcaatgttcgcttatccacctttgccatttgttccataatttaaccctcatagcattttttgttaaacatgataaaatgttccctgtattatacacgcaactatacgaatgacaaattaggattgcccatgctcacaattgaacaacaaattgaagcctacgcagataagatcccgtcaatacaaaagcgattcacggttggcaatatcgttccctacccttatcaggcggtggcgtatattgagactgcaaagcggatcgcaaaatatgagcatccgttttacattaaggcttcggtttccgccgggaaaaccatcatgatcgccatgctcgcggcgcagtgcaaggcaatgaacttgcccatgatggttctcgctcgacaggctgagatcgtgaagcaggattccgaggagatcagtaacctcgatgttcccaactccgtttattgcgccgggttaggcacgaaggcagcatacttcccgatcgtcgtcggatctgaagggacggtggttaatggcctgtttaaaatgctgggcgactacgtgccttcagttctggccattgacgaatgccaccaggttgactggcaggatctggcggaagcaatcgccaacaatgaatcgttcgaatacatgagcaggccgaaggataagccgtatcgcgtgaacggggaactggtcgatgccgaccacccatacgacgaaaaattcgacgatgtagaattcggcggcggtcgcacgcaatacaccatcgtcattcgtgagttaatgcggcgatgcctggagaagacggggcgagagcttcgcatcgtaggctataccggatctgagtttcgcggggtggttcccattttgcaggaagacaagacgcagccgggattctggcgcgagcagatcaccgacattaacacaaactatcttgtcgagttcggatcggtagttccgacaatttttggggatactgaatccgaggggctggggtatgacctgtcagagtttcacggctccagtcaggacggtacgcaggattttagcgcggaagaattgcgcaagatggaaaagaaaatccatgaatccggcgaaatgacgaagctgatcatgcaaaaggtcgtagagcgtgcgaaaacccgaaacggcgttctgataacttgcgctggacagaggcattgcaaggaggcggcgagctatctaccgccggacgcaacatacgcgatcatcaccgagaagacaaactcaaagaaacgcggcgaaattttggataaggcgaatcgcggggagattaaatacatcttccaggtgatggccctaaccactggcgttaacgttccgttttgggatttttcggtgatattgcgcaagattggatcgcttacgttgcttattcagcttttggggcgcggtatgcgactgttaaaagactggcaaaaacagccgccttactcgtgggtgaaggaagaccatttagtttgggacttcgccgggactatggacgatttgggccagctatacttcgatccgattcttgagcaggcgcaataccaaagacgcaagagcagcaagaacggcccgaaaatttgcccggtatgcaagggagaaaatagcgagtacgcccgccgatgcattcacaaagacagtaacggcaatcggtgcgaatatttctggatatcgcagcgctgcgaagaccagaaagacccgcgaaccgggaagattaagattaagggatgctacgctgaaaacgatattgttgctcgccagtgcagatgctgcggggtgcagcttaaagaccccaatgacaatctcaccgggaagcactatacgcaaaatgactggtatgatgttgtcgggttcgatatcgggttgactcgcaatcagtccggaatcatcttcaattacgttttgctgaaccatgacggcgagcggtttaccgccagggaaaagttcttcccggaatcagagaatcagatttgcggcaagttgtggcggcaaaaggcggtcttccagcatgttgatgacgcggtaatgcgtggaaagttgggcggcatgaaaaactcccgcaagatcctggagtatgcggaatacttccgcgcaccgaagcgcgtaacgcatcgcatcaacggcaagaaggaagatattatttcacgcaaagattttggagatgcagaatgatcacagataaagatgattatctcgaatactacggcgggcctgtaaaggcctgcccacttgagaaaatcgaccagatgaacagcgtttcgtggctgcggcacgaataccctgattatctgttttggcatacggttaacgaggggagcaagcacaaagcgagcgcggttatcgatcaccaaatggggttgctgaagggagttagcgacattctgatcctgattgggttcggcggcaaatacccgttcgcggccatcgagctaaagcgccagggcaaggcgcaggcgtcaccagtgagcaaggagcaaagggaattccttgctgccgttcgccgtcgcggtggcttcgctgccgttgcttatgggttcgagcaattcaagatcgctttctgcgatgccatcaaatagcactttttgttaaaaacgcccggcgaaggccgggtattattaccccatcgaaacgaagaacggagaaacatcatgaaaaacttcttgtgggtaatcgcatcaatcggttttggtattgtggccactggcttcggcctttgggtaattactcttgctggtcattttaagggtttctaaatgaaagatatcgcagacaaagacactcgtgacgcattcatcacgtttgagcaactggagcgcgaaacgtttattggcaacgcccttgctactggcggacactatcaggctgtcaggcccgacaagttttaccaggtaacaggaaaccgatacgctgggagcaaaacgcctgatatcgtgcgcgataagtgggcgaccgatcgcagcctgatcgcatacatggaagagcgttacggcccttacgatcttgatgccgccgcagaccaaagcaacgcagtttgcccgaagttctatgacgaaaaaacggattgtcttaaacgctggtggggtaaaaacaagcacgtctggttgaatccgccttactcgtttccagatccgttcgtgctcaaagccattgagcaaatggagcacgacaaccagatcgacattctgctacccggcgacaattctactgcctggttccgtgacgcgcagaagatggccgccgaaattatctggattgttgccgatgttgaagaggatgatgacgggaaccagttaagccgatccggtcgcctcgccttcatcaatggattaagcgggaagccagtcgacaacaacaataaaggaagtgttattttcatcatgcgcaaactcaagccgggagaggagcaaaagacgctttacattccggtaagcgagatttgcccttcattagctaaaaagcgtatgcgcaaacgtgggatctgaaaaatggaacagatagaatctttcaccgagtatcttcggatcgttgttgaattgctggacaaatacggcttcattgggacggatgaggaaaagttagcctttgctgacaccatcgacggaacctacatggagttcatggacaacggaaccccggtcgctgactggccagaaattcttgaacgagaattgattgagtttaaatcgcatgaaggcgcggagtatttcgcaaaacagcactaattgctaaacaatacccgccgcgtgcgggtattattactccatcaaccaatcaggagcaaacgccatgaaaacaaaaaccattgcagacaccatcaagatcgtaccagcaaaagcgcaagtggtatctcgccacctggttaacctttctcgcctgtgcatggccgactacatggcgaacccttcagagaatggccttgatggtgtggtcggtgagatttattttcgcgccgggtacggccttgaaagcgtggccatgtatgagcaaatggccgaaggtttttgcatttacggtgacgaatgatgattgtagagactggtcgcgctgccgtatggcagcacgctaaagaagcaggaataagcgatgatatcgtgaagatcgcaaagtatttcgatatcaaagacatatcaattatctttggtgggaagctcacctacctacacgagcgcccggtgaagcgcacgcgaatagcagtagcaacgcgagcggaggcagacgcgctgaagatgttcatacacgagtcaaagcagaccaaaaaatattacaagtagcggggaggtgaagaatgcgatatattgcgatcctgattacggcggtggttctcactatcgcaatctttaactacgcaattcaattgggataaattatgtcacctaaaatcacagacgaagaatttttagccgcccgcgaggaggggaaaacctaccgcgagatcgcggaagagttcggcatgaacattcgaagcgttgagcgtcgcggcgttcgcctggcgcgacaaggacacctacacggaaacgcccacgttgcgaagcatatcccggacggcttcggcgtcaaaggcacgtcgacgatgattcgcgcggacggctccgaggtcgttcggtgggttaagtcggaagtagaccgcgaccgcatggtcgcacttatggaggcggcgcaggcagctttctgcgaagatcttccgcgagccgaaccgcaaccgctggatgaatcgaagttctacattgaagatcagcttgccctgtacccgatcttcgacctgcatattggggcgatggcgcacaagcacgaatgcggcgagaactatgacaccagcacggctgagaaggttctaaaccgcttctttgattattccgtgtcggtggctccgcaatcacaaaaagctgttttgctggtaggtggtgacttccttcacagtgacggcctggacgcagtaaccccggcaagcggtcacgttctcgatcaggatagccgatacgcaaaacttgtttatgttgccattcgttcgctgcgtcgcgcagtgtcgctactgcttaacaatcacgcagaagttgaagtgcaggtgattgaaggcaaccacgaccaggccgggatgatctggctacgcgcagcgctggcggcgttctatgagaatgagcctcgcgtttttgttgatgttagtccggcgatcctgcatcgcaccttgtggggcaaaaccatgctgggctatacgcatggccacacgatgaaaaagccggaaacgcgccttgctgcgatggctaccgacttccgcaaggagttcggccagtgcgactacatttacacgcattccggccactggcatcaccagactgtaacggaacactcgttaggaattgacgaagtgcatggccagttaggcgcaaaagatgcctacgccgcacgcggcggatggcgttcataccgccaggctgcggtgattctgtacagcaaagaatatggcgaagtaggccgttttatctaccgtccgaacatgtaaccacaacggccccgcgaggggccaacaaggaaaaaccgatgaatagaaatatctgcattttcgatctcgatggcacgctttccgacggaacccaccgcttgcacctgctgccgaaaaaagatctccaccttacagaaagttggagcgaatttaatggcgcgtcaattggagacagcccaatccaaagcactattgacgtggcgaatgcgctttatcgatccggaatgaccgttatcatcctgactggccgatccgatgaggtgaagaccgaaacaatgatttggcttgaccgctacggggtgaaatatgacagcctaatcatgcgccgcgccagcgataaccgtaaagacacggtaatcaaggaggaggagttacgcaaaatcggacttgatcgcattgttgcggcatgggatgattccccaaatgttattgcgcacttgcgcggcctgggtatcacgacttaccaggtctgcgactacggcgaaaatcttcacgagcacttgaaatctcacggagtagacaaatgaaaaatgtaattatcctcaacggagcgccgggcatcggaaaggacactatcgcggaaatcatctcgcggaagtgggaatacaagaaccttagcttcaaacagccgatgtttgccattgctcgtgctgtgctgggatctactgattttgcacgctttactgccagataccacgaccgcaagcacaaagaagtgaaatgcgattttttgggcgaccgttctccgcgtgaattcatgattcacattagcgaaaatttcgtcaagccgaccctgggaaaaaatcagttcggcaagttgctttgcgattcggcgctaacttcgccgtttaactgcatcgtcagcgacggaggttttgatgaggaggtggagcacgtcgcagcgcatgaggcgcttaacgtatttgtcgtccgcctccatcgtgacggcatgacctttgagggtgatagccgcaagcatattcgacgcccggatcttatttgcgacacgtatcacgagcttgattttgatatgaccactggcgagccggaagacgacgcgcaaaaaatccttgatatggtgtcagatgttgcattaaaattataaagttaatgcctttattatcaccaccttaacgattgggaaccttgatgggttcccttttttttgttcttaatttggcctaatgcatatatcatcaccttaccatttaactaacagaggttgcatatcatgcgagaattcatcaacgcggcaaccaatagcagcggtggcgttgccctcgcgggatctgcaaccgggcaattaatcattgctgccattggcttatttttcatgattctattcggctcattcggcgcgtggttgcgctggcgagattcaaaggcgcttcgtgaagcgctggaagccggggatatcaaaacggcgatgaagatcaggagtaaataacatggggattaaaacgcgggttacattcgcggcggcggtggcgatcgcggtcgcgttcctccccaaagtggaggacacgaaatacaatgtttatatggatatcgctggcgtcccaactgtatgcgaaggcatcacaggcccggacgttatcaaggggaaaacatatacccggtcagagtgcgacgcgcttttaactaagcatatccaggtggcgaagcgaaccgttgacagcaaaatcaaagtcgatgttccggacaccttcagggcgtcgatgtacagctttacgttcaacgctggcggcggcgcatattctggcagcaccatgctgaagttaacgaaccagggccgattgcgcgaggcgtgcgagcagctatatcgctggacgtactaccgcaacccgaaaacgggaaagatggagaagtcgaaaggcttgcataatcgccgggttcaggaatatcaactatgcattaaggaactgaaatgagcacattaaactttcaacgagcgctggccatcggctttatcgtgtgggcggctgccgtcgtttccggttgcgcgtcaagcgtcccaatcctttccgatctggttggtagcaagccggatatgacggcgcaagtcggcgcggagaacgtgaaacaggcggttggcgtgaccaacaaaacggacacctcaagcaagcaggagaccacgttcaaagagtcggctgtaggcaaggttgacacgtcgaacaagaaatccgtaacgacctccagcattcacgccaaccagatcacggcggacaagatcgagatccggaatgatgaaagcggaagcctgattccgtggctgattggtggtgttggggtggtaatgctggcgatcggggtgttcggtctttggcgggaacgaaaaaacaaaggggcgtaatgcccctttttctatatgtaccgtttgacgtgcaatagcgctactccgtcttcatcgttaagaccatgttcaaccgtgttggttgcggccattccttgatagagcaagatgagcgcggcacgcaagtaattttctggtgtgatctgtttcacgcaaacaagcctgtgaacttccgttatcagatcttccacctggtttcccgaaaagctgttcatcactgagttggtcaaggtgcatcatctcccacatatatcggttatccatcccttcgaacgaccggaaatcaaagcctatctccctgttatccggccccgtacaccacacagcgccgttttttccgtcaaggtatccattcgtatagcttcgcgctaaaaactccttagagaccattgaggcgaacatacgttgcgacacgttggcggcttttgccaggcgaggcgcttcgcggtgcgtgtaaacgaacttcgcaaaatcctgccgggtgaactcccggcgagattcgcagaacttgtaaatgtcaagaatgaacatcaattacctcatgaacgacgggttgataaagacttcggaatccatcacgcagataaagcctaattcctccatcttcggcaataagcgttccttaatctttttgctcaccccggcctggcctttgaagatcttcaggttgcggcaggcgttataaatgccctggacggtcataacaccttttgcctgtttgcaacgactggcgataacgtcatacagcgctttaatttccgctccctcaccagcaaagccggaagagtcagccgacgacaaatacgttttgctcaattcatggaacatgatgatcgcttcgtcaatggtcgccgtgtcgatcttcttcgagcgcttcccgccgggttgccagttccggatcgtgtgaatcacggaagccaggcgcataacctgcttatcaaacttacccatcgcaccgcgaagcatagtatgcgaatactttccgccgtcgcctaactccggttctaattcctggcgggccttgttcagtctccgcatggctgcatccgtaacctgcaacttaacgtttgattcgctcataatgtcatgaatcagccggaagtaatctgccttcagtgactggtcgatcggctcataggtcgaattcccgttttcgtcgatgaacacgcgctcgcctaaacgggtttgctcacgaaccaaaaggaaacgctccgagacaccgatcccgcgagaacccgcttgcatgatggcgtcgatggtttcatcctgtgcaattacgcaaatgcagcccaaagccacgaatgacatgttattgctaacgtcggcacgagcgatcgatacgtggcctttatcccatgctttgagcaccagttcgctgttcgtcttcttgccgccatcgttgccatacgtgatccccaaaaggctgttaaccgccgtcgcctcatccgagataacggcaaagttgccctggcggttgttaatcttcgccaggccttccggggtggtatcggataccgggaaagttagatcacataatttttcaagtttctcttccagttcgtcacgatcttcgaaaagtttcaccatatcagattgcgataactcccctttgagcgcctgcttgttggcggacagcttcgccatgattttcttacgctccttcttgcgagactcgttaatgcgctcgacttcggcgacgatcggatcgatggccagcgagttaatggcagacttaccagcggaaggcggctgcgacgtgataacgtaaagcgttgtcggttgctcgctgccgtggtactcgacccaaaagcgacccatcatcgcggcggacacggttccgagaaagtgcatgtaagcggatgattccgggaactgaacagaacgcgctgcatttagcgccagcttgccgaccacatcgtaatcattggcgatcgagattgttgggtatttatccgcgtttacgtcgatatctttgggctttggccagaatgaaacggagtcacgatacccgttcgcacgaatcgcaacgcgcaggggactgatcccctccctttctgcgatggcgataatatcttgcggtgatacgcggtcatttaaaaacatgcccttgctcctgattggttaatcgttcggctaatcatatgccgtattaaatccgagatccagtgataatctaaacacgcttgaaaaacgcgcttggattatcggggcgcatggccccgaacccgtcacaggtatttagcttcgaaagtagttccgtcagacacactgaagccaacttcctcgcggtacagcgtccagcggcatccgtcacggtcgaagatgtatccagcaaccgcaccgagcgcacgaccactttctacctggtagcgcttgccgacgctgaaggattttttcatcgggttgctatggtcaaggccgacgcattttagcgttttggttttgagttcgatgaacgtcgcaaccgccgctccgccgtctccagcaataaacaactcgccgctaacgcctaccgacaaaataatgcgcttcttcttcagttctacgttgtcatataccatcattgacacgttgccttcatcgtcgacgtgggcggaataaaggttgttttcatggatgttaacggcacggcttgacgtgcatttaatcttgattgacttcgccatttattttctttctcccatctcgatatacaggttaaccagatccagaaagtcagctttatttctgcaactcaatttaaagccaacgtgcgattcgatcttattttgcattgccgccatcgttgctccgccgttatttatcttcagaacttcgcggcatacgtcagccagtttttcagatatcatatttcaccaccgtaaatttagtgtttttgcaagcgccttcgatatcgctaattaggcgattcactctgatattaatcatcgttttgtggtgcattacgtcaacaatgccgacaaccgttaacaccatgattgaaaagataagagcaccaagaccatgcatagaaagtagtgcagccatcactgcgatcgtgaatttcattccggttttctccgttgcatttcgatgtagtaactatacccgcaattaagcgggtatttttaacaaaaaatgctattctcgataattcgcctggaacacggcgcgggcaaaacctcgcggggtaatcgagcgcagcattttagtcctttctgaccttccgcccaaaaacttccaggcccaaaagaaattcacgccttctaccccatccggaggcgggagccgtttcggttcgacaaaaccgtttccgtgccatatgcacgttttcttcgtgtaattgtcacagtggggcatttttggatgccacacaggttcgttcggagaaacatagccgccgaagtcgcgcgggtgaaaatagaagtcaggcttgcgccatagtgacgacaattttccgaccgggttttcgaccatccaggggcaaccatacttattgcctaattgctcgaccatcttcgcatcatctgcggctgatagaacgtcattatcttgccttacgtgcttgattccgctatgcgctaacagcgtgcatgacgggaaagcgaaaatgaagtcaggatcgggaatgccgagaatcgatcgcttcacgtcaaaatccttgtcgatccaaatgttaacatactggatattggggtgaaccattcgaatgctgtattctccgtggtcgccggagtcggcattgaagcaatacaccttgcatcccttgatggcccacggcaggcccatgatgcctgagccgtcgaacatgcagtaaataaccttttctttcatgctttccacgcctcaatgaacattctgttcgattccagcgtcagcgtgacgccagccagggaggactgaacgaggcgaccgcccggaaccgtcccgatgatgtagcggcctttcgacttcgtgatcgtgatctgagtgaagccggaggcgcggttcatgcggagaacgacgcggccatgcgcgttcaggacggcgagaatggaatcagtcttcggatggttcattgtgtagctccttcgcttgttggtgtggggatagtatgccactatcccgccatgttgttttagcaaaacgtgctatgccggaacgcaggtcgcgtaatcctggctgatgtagatcgtgcgctgaacgcgaggttcatgatcgccgagttcctggatggtaacatcgttgcttcctacccggcacggaaccgatccgaagataaactcgccagtctgcttgtcgttgatttgccatacattaccgccctcctttttgacaaccaggaaaggtgcgctgtctgcgctgaactcttccgggccacgaccgtagtaatgcgtgatcgcagctttggccgcagcactgaaggcatcggtaacgtcattggtcgccttgtcgcgcatggccttgatatgctcttccggcgatccgatgatgtaggaaaagctgttcgaaatggtaactgttcgcattatattttaacctcgttttggtggatgaagtcggcgacgtaatggcattcgatcggattctcgatacccgcgagcacctcgcacgacccgttattcagtagctggcaatgctggcactccgcgccgccaacactggcaatgacaatggcgatcccgttgcatgaaccgccgaacattctgtgcgggaaggggtaagcatcgcaggtgcaaaccacctccccggcccgccgtttcctcatacctggcccttctcgatgcagaaaacccaatcacgagaatcaaccgcaaagcgtgcaacgccgtcgagcaccacgaagacagtaaacccgttgacgccgcgccccttctcgatatcggttacggtacggaacagatcgcttgcgccatattgaattttatccccgacgactacatccgcaaatgctttcatggttaatctcctgactggtttcgatgggttaactataccaggcctttcggcccggcgtttagcaattcgtgcttatttcactgctttcttcgctgccttgtacgcctctttgaaggccggaacatcttctaccggaatccagaagccggagccatagccatcatcgtagcaagggcattggtcgcagtagtcgccccaggttttctcttcgccgccgacagagaatccagtagccatttcgcataacgcctcctcaaccgcttcgatcttgtcggcgtcgctatccatgataacgaagttccacttgccgttatactcgctgcccaggtttattgattcgcgttgaagtttcatagctttagcccctctggctcaattcgtttcgttgaagtaatcatagcaaagtcgatcgggttggttttaacaaaaaatgctattcctgcgattgctgattattccaccgattcggaatagtggaataggtggtgattgcacctgattccctggtgattagttttgacgaatcatgattgcttttgattgtttcattctgtgcaataacttggtggagtgtttcagtatttgcaacgaattgcatagatgtatgcaccatgcacgcaatttgccgatcgaagccagccaaaacgccaggtgtgtttcacaaacatttacgtcgtgtggtaatgtgggggagaaataatcttacctaaaaattgcgcaaaaagtgaccaatataagcctataatagatatataagtatatgataaataacaatattattattattactctttatctttatatatgtttggtaagatttctccgggtaggttatggattccccttgcgccagccataaattttagatgttccgccgcgaaaaaatgtatatagggatatataggggatgacagcaaatcttaccaaacacgccgaaaccctttgacggcaaggcctgcggcctgtattatcaccttccgaaacattaccaaacgccgtaagtgtgggggaaacacaaatgcaatataaaggctatgagttcgaagaagtcgacgtgtccgagtggatgcagtacgacgcagataagcaagccgcttaccatgaatggctgcaatccatcacgtttggcgacgccaccaggccagccggacggagccaggaagccgcgaagccggaaggtacattcactggcaatcgctcttccgagatccggcgcatgttcctggatggcgggcggcgtatccagatgacggcggaggagttcgcggagaagttcggcgttcacccggtcgacaaccatttccgcaggccgttgctgaaacttctggagccgggagaagtgttgcgggtgagcctgggggcggggttaatctccgtctttaccgagttcgacgcaatgactggctcacacctggaagctgaggcatacaggcggcagggcgctatctctgaacgggaaagaatccttgccatcattgacgaagtaatgcccggcggcatcatgctaaaaggctataagctggcactaatcgccaaaatcacaggagaataaccatgaagctatatccagaccagaacgacccggcggcacctatgcgcctgggcgacacgctaatcgacgaacaggaggttatcgacgccatcgccactgcatcggacgacgaaaatccaaccgccctggagtgcgttacagccgacttgctgttaatgtcatttctgccgggatctgagtcgtatatccagcacatcaccgaggcgggccaggtagtgacgaaaccggaattcatcggcgcgtcgaacgtcctggccatgatggccgatgagtcggacaacatcattagcctcgactatccgcaatagcactttttgttaaaacccggtcagggagatcgggtattatctcttcatcgacaacgaaccgaggaaagcgaaatgattactctgatcacctgggaacacgaaaacagcaagccagaagtgcgcgaattcgagaccgtagcggcgtgctacaacctggcggcaaacggtggcttttacaaggcgcagatcgttaacgagttcggggtggtcgattatgaattttaaggcgagcgatgtaaaacctggcgtggtctacggatcgcgcctcaataaccgcctttggcgctgggatggcgaaactatgtggactaaaggcgagggcgatgttatctggcatgagtgcggctggccccaccccacaatgagccgccttgatatcgcttattatctttcggttggcgacatgcacgaggtgggagatagcactttttgttaaaacacgatcggggtggcttgctatagttaccccatcgaaacgaatcacggagaaacacaatgaaatcttgcgaatatgtcaacacacttaatggcctgatctactggctggaagatggcgcagtgatgatgcgcaaggatggcgtaaacatcgcccgtcaatccaacatgacggcggaaaccttcttcgagatggtcggcaacgatatgatgaagctgatcgaggtggagccgaaggataagggcatgaccatgcttcagtttacagaattcctgtcgagaatcgacaaaagcgccacgaccgcaaccgcacagacggccatccagggcggagccacccacattgccatcgacggtaacggtgacgtcttcgcattcaagatgcgcccgcgccactgcctgccgaaagatgatgacgcaaaggattacctgggcgaatggcttcgcggttcggagcagtacggccacattgcgcgaacagtctgcttcctgggtaacactggccgcgagcatacaaactggcgtgaactctgctaccagattcctagccaatagcactttttgctaaaacccgatcggggtaatgcggtattattaccccatcgaaacagaggagcataaacatgatcggcaaccacaacaacccactcaatgcagcatttcaccgtcgcgcggttgagcaacacttccacgcgctgaaggtggtgtgcaacgagatgaatcttatgcttgacctgccgtcatgggatctgcaactcgaagactactatgacggcctccgcgtcaagcgtgacgatatcatcaaccgcctgcgcctgactggaatgtttctgtaaggagaaaacaccgtgcaacaattcaaatctcgcggcagggtctacagcctgccggataccgccactcatgccgcgcccggcgtatgccacggcctatacttcatggatggcggcaagtggttcttcattggcgatcttatgacggatggtgtgcagccgattctttgcggcaaacatcgcggattcgacgattatgctatcgtggaactgaagccgaagcgcaatccgttcggtttctggaacaaaatcaaaggggcgatcttcaaatgaaccaattcgaattcctggcgcgggcgcaccgcgcgcttgcaatgtacgccttcagcatggatatgaagattatcagcattgaaatcgagtcagacagtattagcattttcggctatgtgggcgagtcgcgccacgttacaaaattcatcttcccgtcgctggacagcctggagcatgaggcgttcggtttctgaatagcactttttgccaaacgcccggtcagaggatcgggcataatggccacacaccaaacaacggagattcaccatgaagcagatcgtcaaaaacgcggttgtcgccatcgtcggaaccaacttcgaaggcaagaaaagccgcattcaccttttgcacgttggcaatgatggcaaaattcgcggagctttccattacggcgaacgcggggagcgccttcacagcgacctgcattccgtccgccagctaaccactttcaacgaatggcgaacccatcgggaatggctgccggaatatcattacgaggggttgattgtcgaatcattcgttgccgacccaacgaaacttaccgcccgcgactataagcgcatggcacgcaaggcgcacaaactaatgaagctcacgccagaagatcacgtatggcatattttcgcaaatcagctttgaggtagttggatgatacgtttatcagacttcgatcgccaccgcttaaccgggcaatttggcgaaaagccagtaatgtgcaagatctcgaaggtaaaaggcgaccccatcgagcaggccagcacgcttagaggcctggccatgcgcaaccgactttacatccaggtgcgaggcggactgttcgcaaagcaggttcattttgcgtatggaacagggttctacactggcggagacggagtaaatccagcgccgaagaaggttaggccgcgcgagataatcgaacacggctacgtttggactaacgggatctactaatggaaacgcttaaagttatctgtacgcacgttggctattcgccgctatccacctatttcacacctggccgcgagtatgacgccaggttcggccctggccttgatgaagtatggattttgcaggacgaccagggaaccactgaggatgaggaattctggccagcctgccgtatgccggacgaaaagatcgccatgtacgccaataggccatacgaaaacaacgttctatttgaggtgaaagtatgaaagtaagcaaaaagaaactcgcgctgtattgggccttcttcctggctggcctggccctgcatgacagcgtgggctggcagacgatcggaatgctgtgcatgattattggcgtatgccgcctgtcggagattaacggcttccgccggggatatcgggcagcgttcagcggtgaaaaagaatagcactttttgttaaaactgccgtaacgtcatttgataaagtggcgttactgaagtgaaacaatccaatcaggagcaacgcaatgaacgacaatttaatcgcactgctggaagaactgaattcctacggctgcgcatacatcgagctttcgagcgagcaggttatcgaagtcgcaatcgacgatgacgccgggttcaccaggttaagggtggcggcaggggccgaagaggaattcgaagactgcggcatccgtgaagtaactaaccttctcgaagttcaccaggtgaaggagatccgctaatgaacaccgtcaagctaatggttgtcaacgcaacccgcgagcgtgaacgccacctcatcggctgcgtattcgatgccgtcgaggttcgcgaaccactcggaacggttcacgtaatccagggcggataccttaacgaattcatcgtcaacccgctggatactgacgaagatttgaccatccgtgttggtggcgagccggaaaacgcgcttttccacctgcggaaagtatcgaaggcgtcgcagcgcaagttgatggttcgcgcactgaagcgcatagcgaagcagcgcggatacaccgacgcatacatccgcaagttcggcacgttcgctggcgtaggcgattgggcgcggtcatgggccgacttttacttcaacaaatccggcgaattctgtgccgcgcatactgactggctgcatggaaccgaacacgatcccgttaacggccacgagtggtacgaattcattgaggcggaattagacgccctttgatagcacgaattgctaaaacgaacgtccggggatggtgcatactatccccacactaacaagagatggagcctaaccatgaacaccacacaaattatacacctgatcccgtccgacaacttcgccaaagacgacgacccgctgttagccgccgtcattcgcgccgggatcgattgggcgcttagtgatgcctcgtgcgaatcattcatgcgtgaaccgttctcacgaatcgcggagcttgaacagcaggttgctttcctgactggtgaacttcaggcggctatcgccacgatcgagaaggttcgggaaatcatgcgcaccgaacctggctatgacgttgaagatcacgcgcgagttttgcgcgtgatggccgacgctttcgcaaagctccagcaatagcccgaaccacaaacacgaaccggggttgctgcatggcaaccccatcaaagataaggaaaaacatcatgatttacgcaattattgccctggtggttcttgttctggccctgtatgcgtgcggctgtttcctcatgcgggccttcctgaaatctgcggattctaccgacaaagaagatctttatcctgtgctttgctggccctggattacactttccgccgttggcagcgtgatcatttcccgcaattttaagtggtgagatggcgcttgggttccaaaaattgatgcccgccaaatagcacgaattgctaaaaccgatcaggggtaagctggtatagttaccccatcgaaacgaaacggagttacagcaatgaaaatcaaaatcaccaaaatcgacacgctcaacggcgacggctcaattacactggaagaatgcggcctcaaaatcggagacgttcttgatgttgatggccacttcaatgacggctcctactgtgtgatcgctccgcgcaatagcgaattcatccaggctggtgacaatatcagcgtgagcaaagacgaatgcgaggttgtagaagaatgagcaacaagatttgggtgctgacatacactatcggaaccaacgaggggcgcaaatcgcgccgcctcatctgcgacaccaaagagcgggcgattaggcagcaaaccgttcttggtggcgaacttgtcgagtatctccgcaagcctgaagcgttcaaggtgaactggccggaaggaatggatatcaacggcgctttagcgagcctgcgtgaattgcagaacaacccgaagacgtggagcgactttcaatgcctgcgggcggagccggaagtgaaggccgacccgttcaccaatattcgggcgcagcacgcggaatggtcggatcgccagttcggtaacgttgggccagtcgggccgctcaagcacctggcgaaagaggcgatcgaggccgccgaagcgccggatgacattagcgagttcgccgatatcctcatgttggtatgggatgcaacgcgccgcgccggattcagcgatgagcagttggccgaagcggtggcggaaaagctggaacggaataagcgccgggcgtggggcgaggtcaaagatggcgaaccttgccaccacgtaaaaaattaacgaaatcgaataccgtttaaagcgcctgtaagccattctggcgggcgcaaatttaaggagtgcgattgtatgcctgaatactcaaaagtcgaagatatgccgattggcgcaaccattacgggaatttgcatgagcgagtcggtcgacgccatcaagccactggcgttcccggttacgcaggtggagacggacagcagaaaagggttcatcttcatctacaaaaatttcaatagtccgctgcgtgttgaagtgttcattgctcgcggaacatgggtagaatgggagaaggccaaatgttcggactgaatgaagcgcagtacaacgccgtgaagcgcatagcaaagcagatggccgcagaaacaaaagacgccatcaagaaggacaagaagacctacgatcaggtcgccgcgaagatgatcgataaacattgggcgcaaatcaacacgctggttactcgcggccagtttatctggatagctggctacctggaaggccgattcggtcgcagggatggcgagtatgaataaaaaacagccaaacgattcagcgacctattgacgcgctcgcgctgaccgggtaacttgaaccacgtagacacaagaggcggtaaacatccgcaagtctagccccgctttggggcatttacaaggtggttatgatgcaatataagatcatgctcacggcaagaaaaatgggcggcttttgcaagtcctgcattcaagagtttagcatgacgattgaagcgaacgacaccgccgacgcggtggagaaagcaaaaaagcaatccggcgtcaatctggatacgcacaaaatcaacataaactacataagggaagtcaatcaatgttaactctgattattgcttttttaatgctgttcataggctatcacgttggcgcggctcatcttgtcgagcgcctttcaaggcgggtacatgaaggcacttttgctgccatgttctacaacaagaaaacagcacgttgggaaaaaattggcgacccggaaggtgtcgcaaaacgaatagccttttcgccgcttccgtatgttgactgcgagcctttcgtgaaactccagaagacgctgaatcggcgaaacaaactgatatgacaaaagaacccgcttcggcgggtttttttatgcccgcgatctgatatactcgcaaatcaacacagaaggagggttacaaatgtctgaagaacgtagaaagcgcgtaacgaaatcgcactttgcaggtaacttcaaagcgctgtatgaaaaagaattcggcgttgtgctggggcgcacggcagagatgacgccggaacaattttttgatatcgcaaagcgttacttccagtgggcagaagagaacgcaatcaaggcggcggagacggcgacgtttcagggcgacgttaacgagtggggcgtgaataagccgcgcattttcacgctcacagggttaagcctgttttgcggcgtgaaccagtcaacgcttgggcgctatcgccacgacccgaactatgcgccagttatggagtttatcgactccgtaatctatgagcaaaaattccagcttgctgccgtcggcatgattaacgcttctttcgtcggtaaagagatggggatcgataagccgccagtgctgaacatcgacgctatcgccggggataagaacgagatcaccgaagagaaattagagaaagccgtgaccaatattcttgataagctgtaagggtaggctatgaacgaaatgatcatttgggaagacctgtcgccagccgataagctggcaattaaggcactgagtacgcgaaacttttcgctattcctgaaaatctggttccagatcattcagggcgaaaagctaatgtggaactggcatcactcctacttttgccacacggttgatgaaattatcgccgggaagcgcaagagcacgatcgttaacgttgcgccaggctccacaaagacggaggtgttttcaatccacctcgcgccgtatgcgtatctcaagtgccggaaggttcgaaaccttcagatctcgcagggtgacgccctgtcaaaaggcaactcggatcgcgtgattaagatcttctcatcaagcgagtggcaggagctatggccatcaaagttcgggcgcaagcagatcgatgaatttcaggtcatggacgataacgaccgcgtaaggcttgaaatggtctcccgttcgtccggcggccaaatcgtcggtaagcgtggcgggtacatgacgccgggattcagtggccttatcgcgctggatgatatcgacaaacccgatgacatgttctcgaaggtgaagcgtgaaaaaaaccacgtactactgaagaacaccattcgatcccgtcgagcgaagaagaagaagggcgacgaaacgccgatcctgtctgtacagcagagattgcacgcgcaggatgccacctggttcatgatgagcggagggatggccattgacttcgatcgcattgttattccggcgatggttacgcgggaatatggcgaatcactccctgactggttgcgacctgagttcgagcgcgatgtactttccggcccgtcggtggtcattgatggcgtggaatactggtcgttttgggaggagaacgaatcgatcgagaaccttgttgcgctacgcgatgccgatctttacacgttcctttcgcagtatcagcaggagccaatcgccctgggtggcaacgtgttcaagtcggaatggtggcgctattacggagacagcgacaaggcgcacgagccgcgcccggacaagttcgaatatacgttcatcacggcggacaccgcgcagaaggtcaaggagctaaacgactactctgtaatgtgctattggggcaagtaccgggatcgcgtctacttcattgacggaattcgcggaaaatgggaagcgccagatctccgcgttcaggccgaagcattcatcaagcagtgctggcgtcgaaacaaggagtgcggaaaccttcgccggatctacatcgaagacaaggcgagcggtacgggtctaatccaggatttaacgaaggcggtaaacggcatgggcgagatcgtcccggtgcagcgcgataaagataaggtcactcgcgctatggatgctcaaccaatcatcaagggtgggcgtgtcgtgttgccggacaatcacccgttcattgcagagcttgaggcggagatgagcgcgtttacatatgacgattctcatccacacgatgacatttgcgacaacgtgtttgacgccgcaaacctggaaatgaacctgagcgatgatccggtggagcgaatgaaacgccttgcgggattgaaaaagctgggtcgctaatacataatgtgggcctgacggcccacacttaaacaaggttgaaatatgaataacattaagatggacgactataatcaaatctttaatggtggcgctggctatgcgtcaaccctcgcgtctatcgcggcaagatttggaacaatgtcgcaggttgaagagttctatcatgaaaacggcatggcgaagaaaatcgttgacgtgatccctgaagagatggtcgctcccggcttccagctaaacggaatttcagataacaccaagtttcaatcggaatgggacgggttaaatctggagccgcaaatcaccgatgctctttgctgggcgcggctgtatggtggctcctacgtcctggcgatggttaacgatggtcgcgcgttgacttcggcagcgaagcggggtaagccgctcgaatctatcgttgtttacgaccatgattccgtttccgtcgcagaggaggaaaccagcccacgaagcccacgattcggaaagcctaaaatgtacgaggtgaagccgctaaacggcgggcaaccgttcaaggtgcattatacccgtatgcactacatcgacggcgagcgagtaaccaacaaggtgcgccagctaaataatggcgctggtggttcggtgctgaacaagtcgctcattgaagcaattcttgactacgactattcggaatatctggcaacgcagctactgaagcgcaagcagcagggcgtttggaaggcgaaaggcctggcgctaatctgcgacgacaaagaaggcgagtacgccgcccggttgcgcatggcgcaggttgacgctaattccggcgtcggaaacacgatcggcattgatgccaccgatgaagagtacacagttatcaactccgatattacaggcatcccggaattcctttcggcgaagatggatcggattgtcgcgctgtcaggaattcatgagatcgtgctaaaaaacaagaacactggcggcgtaagcgcaagccagaacacggcgctacagacgttctataaactggttgaccgcaagcgcaatgacgattacaagccgctgttagaattcctgttacagttcatcgtaaccgaggaggaatacagcgtcgagttcgaaccgttgtcgcttcctaccgatgcggagaaagcggatatcttccagaagaacgccgatgcagcacgcggccttgttactgaccaggttattgacgccaacgaagcgcgtgataccctatccgcactgattccggaactgaagttgaagggtaatgcgccggaacagaaaaaactaccggatcgcgcctccggttcgggcagcacgcaaagcgcagagatcctaaacaacacggaggcagatgatgaaagttaacggcagaatcccaaactggcgttatcctgaagcaagcgagcgggatttatcccgctccatgcaggacgcggtgacagaactcgtggtagagatgcgggatcgcttagaacgtcttaaatttgacgccacggcggaggaaatcagccaggcggaagacgatatcagcgaatctgccatcgtgttcttttcagccgtaattgcggcgctcgcctccatcgggttgactatctatagattcaactcgaaacagtggcttgcaattgcgatcgcggctggcgggcggaataacgaatccgtcatgcgccttaaagaatttggcgctggtgggtatgaagactggtatcaggaagcgctgaggaagtgggaagatgccgccgaagcgtcaatcaggaagctagcaagcgatatcgtttctgactggacaacgaaagttagaaccgccaacaacattg

SEQ ID NO: 21 - DNA, 176878 bp, Unknown
  bacteriophage strain capable of infecting bacteria of the genus Klebsiella
ccccttctttacaaacataatggatttggcgcggaatagacaacccgccgctgcgttccaaatgtcgtttaacgcttgctacaaaatcgaactctttcccgtatccagccgacatactgtgatacgtgagtaggccaaatgcagaaacatagagatcattttctttatacagattcatttacaatacctttatggtagccaaaaatataacaatcaattgaaggacgttcaccagggaagtgaatgcattgcatgatgcgttcagccattagatcttctcccatgtataccgaagtagtttcttcgttgtaatgggtatcatacgacgttttaagcgtcatgcccggaagccctgcaatgtgcatgaatttagaattggtgcaaggttttcctacttcaccgttaatcatcaacactgcattagttttacgtgcttttctcatttgaatttcaccccgatttgcgatacgttccattcttttacttcatcaacaatatcataatggttgatgtatggtaaagcaatttttaaattactcgcgtcttgaatgttgcgtaagaaacgagtaggagaaagaagacacaaccgctcggatccgttgtttcctttagcggcaaatgatagggtttctcccccgtcaatcttcatatcaacagaaatcgttttgaattctggtgcgtatgacgtgattttgccgttgtctctcggcgtactatagaaacatacactttgtgggacattataacgatctgtttcaatgtacatgtaatcgccgtcagtcattccccacgcggtataaagggatccggtatagtcaccaaaggaatttttaaaatcttccttcgtggtatatcccagcgagcgcaattgcataagctggctatgctgttcgattgcgtcggctttttgttgttcctgtacttgcgcatcaatcgtttcttgccaggaattatacgcatagtaacccacaacagcgattacagccataacccctacagctttccagattttagcgtcttcgtttttgttactcatgctatattccttttaagaaaaagggccgaagcccctttgttaacgaagataaaccacataaccgctttggtcaatcgcgcggtctgcgtcattgaagatattaccacgaatgccttttgctggtgctttccagcttgcaggtttcaggatattaccatcattatcgatgaaagcggcaacagaacgctgattgaacatttcaccagtttctttgttgcgagtatcctgaacaacgcgatgatatttgcggcctttctccagaaagaaaacagtttcgaaaggagaatcttggaaacgagcgttacgcgctttgtacattgcttccatgaaaggggctgctttttctgcgaggatttcgaaagtgttcatggtatatctcctaaagtgtgtttcgtttcgatgtaagtactatatcaaagatggttattctatgcaaggcttttttcgttatccatcaaatattttaagtgttcttttaatgcagggagttcgttcaaatggcgttgcttaactttctcgtactctttgcgttcccagttttcaagattgcttgccagcgcttcatcacaataagcgatcccgcgttctgcatcctgaactttctgtttccattgtgcaactgcttgttgataaagagaaccgttaaccatcataataatttcctcccttgtttcgatggggtaactataccaaagctaccccagaatgttttaacaaaaagtgctattagtaggtatccagtttatacattttgcaccagttcatgaattcttcgaaagtctgagtattaacacgtttttccttcttcactttcttagtgattacaggacggttagtaaaacgtttttgcattttcacagtgattgctactttatcgcccaggtcttctaccttttcaaccagcgcccactgagaaccaatttcagcaccgaaagttaaaccaacaatctcacctgctttaacgtgtgctgcatattttactttaaccattttcgtattcctttctctgtttcgtttcgatgaatacaagataccaaaaagcctcccgcaatgcaagaggcttctttaacaaaaagtgctattttatttctttgagcaatttacggatcccgccgccctgtgtcttatcaaagattttctttgcatcaataacagaagtgattatgtggtagttgttcccttttccgtcaaactcaaactcgaccttgtagtcactacgaaatttcacaaaaacaaattcacctgcaaagtgcttacggaaatgtttttcgttaatgtccaaccattcctgtgtatcatctaactgatacatgcgacaaaacaggatcgaacccattacaacaaccacgacaaggatagctaacgcgaattctgacatcatttacccctgtttactgattgacggtgcaatgatttaggcacaaccggatttcggtatggtttgactttatggatcgtgggttcttccccaaccaaattaggaaattggttgttccattccatcgaaaatggatagggcgatgactttaactcttcgatcatacagtttactaaacggtcgccgattacacccaaagccgccccaataatcgctatacgcataaatcaccccttaattgtgtcaagtacagtaaaccagtcatgaagccatatcgttgttcttacagcgatatacgttaacaaactaatcaatgataccgctccgcaaaaagccagcgtaatcaacaaccggatttcaaatttagtgaaattcatatcaatctcctttctgagaacccaatataacaaaagccctcaaccgaagtcaagggctttgttttaaatttttaccagttttggcaatcgaagaactataccaggatggatcagacgtgcatccggaatagaatcacggttgattttggcgatatcaggccaaagttcaccaacaccatacagtttctttgctatagaatataggctatcacctggttgcacgacatagcgatcagattcaatcttaaccagatcctggttaatgatatcatcaaaggcttttgcttttgcttcgttaatcgtgttcccgtagtaatggcgatccataatagttaatgtgatcatcgtttctttcctatgctgttttcgtctgtctcttctaaggatggaggttcttccagccccagggcataacgtttagcatagattaacatcaatgcatctttagcgcaatcatgaatcgaatcatgctgaatgaatccatctaacatgcctttacgtagtggacacgtggtcactccgcgagtcagtaaacggttttcaatagctgtacgcacatcacgactattccagaacactgtcggcatatcttcgaacgtgtcaagtttccctgtcatagttcgtacaacatcggttagcatagaacgatcgaattcagggccgcgcgtataatcgtatgactgccaacgactcacaccgtcagccgctaaatcagcaaagaattgtcgatgaccttcgtacaaatccatgtcaatatcggaagggaacaaaaccctttgcgcttctttagattgctgtttccaccattcgatcgttttttcatctttgatgcgttctggttgtttccggatgtcaaatttgtactttcttcctttagcaatcagttcctgaaaggtaggcggatcataaggatcatcaacaaacggaacatagctaagttcagctagttttccttttggaaacgggccaatactttcataatcaaatacgaaatctacgggtaaatgactcattcgcgaccccgtttatatgattccatgaaataggccaatgatagcgcgacttccggagtaacatcaacggattcgatcatgcctggagttaccgccatcatcccgaactgacgaagcccacaacgagcaatcgatttttccagtcggatcatgttttctacagcctctgtaaaattgtccagatgttcccaatcgtggtaatcttccattgtagaacgatcacttttcaaaatcagatcggcaaccaattcagcataaaggcgcggaaggtgaatattcatttaaaacccctcaagcatgtttttgttttcacgaatgttacgacccattttcaaagtatcaatgatcactgcatactcttcaaaagtgaattcgatatcttgtgaaatgtttccccacgtgtaggtcggcccgttaggacagtataacccaacttctttgtttgcgttgacaacgcagcgcaattttgcaaacaacaaattgatatcgatagaattgaacccttcgagataatcaagcccctctctaccaatacggtcaacttctcgcaaaatcttttctacatctttgactttaacaataattttcataagaacctcaaagggccgaagcccttagacataatcaacagtgaatcgtgcgcgggtagttcctacataaagcaactgcttacacaattcataatcggcgtatgcgtatgcatcgcgcgtatacatgtatgaatgatcatacgtgcttccctgacctttgtgatacgtacaaaccggaagcgccttaactgtctggaacttgtttttgatttgccagaacgaataccagggggctttgtatccagtttcctgtttcatcttcttatactgaaacgcgacgtagttcaaataatcgcctaaacgttcctgcataaccggatccgcgataacctgaatatccgctttcgtatcctcgaacatcgattctgttttcatcaagaaataatcgatttgtaccggatcgcatcggtcagctttgatagtatcagaacgcggtatgatttcaaggattttaatttgctcgttgttgttatagataacttcaacaaacgaaaccccattcacacggccttctgtcactaacggttcttgcatcacaaccacttcaccaacaatgaacggctgatcagttttgtacaagtgtttacggatcactgcgtttaacttgtctacgtttgcgttagtgtaagcaaacatacggttattgttcaggtcatccggagtcttaacacggctaaaataacgtctcaggaagtcaccagcgttttcgtgcttcattacccctagttcaccattcatgaggggcattaacggcttaccgtcgcgtatagcgcgtgatacctggatgattgggtttccttctgcctgacgcataatcttatccatgcgaatgacatcaaaaatttcctcatcaaagaacggtgaaagctcggtgatcccttcggtattaacaggacggatctgatccttatcacccaatcccaggatcaccgcacaactcggaatagtacgcttgatgatacggaatagttctttgtcaaccatcgatacttcttcaaccacaaacacacgacattcagacagatcagcggcttttttgcctttttgctgttcaaatactcgtaactcttcgttggttacggggctgattttcagtgctgagtgaatggtcgttgcatccatacccaccgcctcagagagaacgtttttagcctggtgcgtcggtgctgtcaaccagatcccactaatacccagttttttcaatgtttcaaacacaaattttaccagagtagttttaccaacacccggcccacctgtgatagtagtatggattttgtttctgatatttttaatcactcgatcatgtgcatttttctggtcttcgctcagatcgtcaaaagttaattcgctcatactttaatcaataccccttgaatacttgcgtgttcaataaaccaacgcatatctttctttttcttttcggttacggtttccacttcttcctttcgaaagaatcggctaagaccactttgtttaactggattcatcttatcatgatattctttgataatcgaatttttatactcgttagcatcgtccggagatagaaacaacaaaggtgttaactctccttccttaatgaagggaattttaaacccgtctttatccttactaacgacgatataatattttgtaatcattctcgcccctcataacaaacgtagaatattccaacaaaccaaaacactgatagtataatcagtaaaagttttctttcaacgccatttacgtgaaacacacaccaaccgaaaagatatgtgatcatcgcgcaaacaccataagaaagaaccccaacagctactagcatcaaaaagtgccattgatcgatactataaatataataaaggagattatacatgatatcgaccgtaagcacaatagttgttcatgctcattatacaacaactcccgtatttgaaggagatatctacacgttcaaatacacttttcctatcgaacagatagttcaattaatgaaaaatagacatcctatcggatggattaccccagcaacaaaacatctactaaggaacaccatcgatggactaccgtaaaatttacaccaatcttatagaaaaagcaagagatagaacactaaattgttacacagaaaagcatcatatcatcccccgatgtatgggaggttgtgacgatcatgataatttagtagaacttaccgcagaagaacattatgtagcccatcaacttcttgtcaagatgtatccacacaataataagttgatatatgctgctaatatgatgtgcgtcaacgcaacacagagaaataataaagcatatggatggatccgcagaaagtggatatctcagatatcaaaagacaggacagggacaaaggcaacagaagaacaacgcaaaaagatgtcagaatcccataggggagacaaaaactctatgtatgggttacgcggtgataatcatcctgcttatggtcaaaaaccctggagaaatcaaataacaatgaaaggaaagcatgaatggaggtatgctgggattttctatgattggtatattaacgatattaaagctggaatttataaaagacaaggacacaagagaatgctacaagaattgcaaattgcaacaatctcccgtgttcctagaacatcaatcgagctattcaaaaaggggtggaacccttacgaagataccgattgggttgagtgggctaataatcaatagctgttggcccaacgacgaagattttcggcttgtttaagagcgtacatcttataaattgtttctgcatccatacccaatgcaataaacttacatagtacaaagtggaattggtcgatcatttcaaacagaacttctaaacgatcctcttcactcagatccgcaaatttagtattgcgcaattcctggtgatttgctttccacggtttccaaacaccggatgcaggtttaacaccgcgagacattccacccagagcggtatacaattcgcgggtttcgtcggcgatcgcgtcgtcttgcagtttcagccaatcaaggatttctccgcaagtttccagattatcaggacgcggaacccaatgcagggtatcagacaggctttgttgcgcatggttttgtaaatccagcatggattgtaaaggatcgccattacgggccagaaccttttgatattcggaatctacaaattccagatcttccgggttaaccaggtgcgcacatgaattaaatacaggagttttatcagtagtcatatcaatctcattttttcggtgatttgtcccacgacttaaatcgaagttttgccgtgagtccagaaacagtattatctttcaaatactgcataatttcaagtttagttgcgccgtccgtttttatcatttcgttgatatctttggaaggccacgggcatttatcccacattacaaccttttctccagcctcaatcaatttaaagaggcggtgagtagtatccggatgacgtgcttcattgtcaagaacccagacacgcatatttttatacggaacctcagaaagtgcaagctgtccaccagtgatagcgccagcattatcaacaaacaggctatctaatggcccctcaagaagataaaccgtttttagcggatctatcgtatcctgtccgtaaatcttggttgattcttcacaggctttgattgtgatatatttcgactttgccccgtcgcgtaaagcacgaccctggaaagattcaattttccctttcttatcgaagatagggatcactaatctcggttctggttttgcgatcggataggtatccggattcaccgtattaaccagttgttgccattcgcgagtaaaccacaaccgatcccacttgtcacgggggatacaacgattctgcacatattttatgatcggatgttcatccggcaaggtatctaacctttcgcagaattgaagagtaggaataaatttcttctcttcctttggtggttctgtatgtgttggctttaacgaattgcgatccttaaacgattccatgagataatcacggtaatcgtctggataatattctttcaggaatacgctaaacggtacaccataaccacagttaaaacaaccacaattcatatgatcaccctttttagaagggtagatccaaaatcgttttttgtacttgtctttcattgagtcgccgcaaataggacaacgcgcattgatgcttaatgcccccgatttacgaacgatttcgctttgaggcagtgatcccatgattcgggttgcaaattctatatcaagatacatttcttacctcagttgactatctttagatcctcgtcgattataccccgcgctgatcatttcgtcatgttctttttggcattcaatacaataacggcaacccttcacgatagccctacgtttttcgggtatcggatccccacaatcaaaacaatgcgttaatgattctccgtttctgatttgagaacgtgcaaaatctatcgcattgtctattgttgcctgaatggtatcttgaacaccgtcagcagggccaaatccaaccgccattgtaaatcctcctaatcaaatgatttcaatatcatagactaagaggatttttctgtcaagaacttacttgcttttctgttccgtcaagcattaacttccaaccacgaaatgcctgtttaaacgaataatttattgcaatatcaattttatcagaaccttttcgacgattctgataaacggtcgcgttgtcactcatatacatgatacaaattggaaaccatgtataatcgttagcagtagcccagatagtgatattcagcggaggaattatcatttctttttccttttccctgcacgggtaacgcccaatactttcggcccgatgttagttactgctccagtagtcacaccagaagcaatcttttctgtatcgccgccagaatcacccgcgaccatatcctctaacatgcgccccttatcataatattctttgaggcgtggaacgttcaacatgatttcttcatgctcttgttctgtcagattgtagcgattgcgtagggtatcatatgaactggttaagttcataaacccactcatatacggaacagcattcattctacgcttgatatggcgtactgaacgatgaaaaggagaatacgcttctaactcttcttttgttttggggttgcgaattacttcgccttgtccatcaaggatccccagcttgtaagcagtccattcagtccagggctttttgagtagccggatcatccggacgctatatgttaaatccatatttttaactaattgatcactcatgattattactctattgtgaaagtgaataaatcagatttggtttcaggttcaaactccatacaaacaacctcgcatagtggtttaacccctttccaatcctccaggtaatacccagtatctataccgcatccaggattcataacgaggccagtttcatcaagaaactttttgcatttacttgatgtggtgctgtcatcttgtcggaaacagtgtgttttcgaataccggaaatttgcagacatttgagggattatgaaagttccctgacgcgcgatctgtgatgcacgttcgattactttatactcaaattccgcccctgtatacttacccttaaaatcagatgttttgattttaccaaaaggcggattactgatcgccatatcaaacacctgattaaattcagttgttaaggcgtctccatgcacccaggaggcttctggtacgatacgcttacctaactcatagtatgtgtgatttaactcaacacagacgatttcgcgcggcgtattgtacatcatgtaatgaaccatagcgaaagataacccaccgataccagcacacaggtcaataacacttccacctgtgcaagcatcgattgtgaaatcgcgagcaagtccaataggggtaaagaacgcccctaattcagaattgtttgtaaacgcgccttcatgaaagttttcaataatgaacaacttctcttcgtaagttagcgctttgtcagagtgaaccagatccattatctgattgtgtttcttggtttccgctttcgttaactttgccattgtcccagctatacaataatgttgatttatttggatagaattcccatccgtctacatatccggtttcccaatcagtagtttgttcaaaaccacagatccattcatatacacccggaggcatttcgacagaatcaggaagcccgatatcttccgcactgcgtccacattcaaagaatgcatcatgaatgaatggtcgagataataccgtaacataaccttcatcgtcaacagctacgatccagcgcgaactatgaggactatcgaacttcggttcttcttcgtccatatccgcttttatttcagccttacaaaaatcaatattcatttcaaaccctctttaacaccctctttcatagctttccaggtagaacccgcttcaccattcagggcggcgaatacaaatagtaagatagcaaggacaagattcacgccagcaatcaccatgattttgctatacacgaaaatgtaaggcattgccaccacccaccaactaaaagaattaccagttacgatgttgagtgctgcaagtaagaaagtgataacgaatgcgattttcataatgtcctcctttgttatgattaaggtatcatcttttgcgaaagaatgcaatacctacagatacaaaaaagcccctttcggggcttaatttttatgcgttattgatgagataccgaagaacgttttttgcttgttcctcattacaaccaactttgaaaccaggttcgatagggaggaagttccagaggaaatcaacacttccttcaacgtcatctttgcctttttccagcatcgctaacagtaaacctttgtttttgatgctgtttacgattgcgtcaaaataaccatcgctgaaatcaacattcgggttcagcatttcgttgtaagggttgttgaatacgttcattttgaatctcctttgtttaactcagtatcttgtctacgtgagttatattaccacaatggagattcaggtcaatacctttttacggttttttgaaaagtttttcgtatttggcttttacccagcgatacatatcttcggccttgtcactggcaatcagtgagaacagcagatagatcgcaacacccaccaacacaacgcctactacaatgtagacgggtaatagaactgggaagagaacccagaaccatgacatatgcgagaagccaaatactttagccgctgcaaaaatcagtgtcagtccagtcagaagtttgatagccggaatcggaatcgttatagtcttagtcatttcattaccttacattctttatggggctattcgccccagtcaattaaaattgaatgtcagattttgcaatctgcgccattttatcacgtcgggtggattcagcctgtttaatcatcgggccttgtgtctgttctactgttttaggcatagtgttgccgtggtagtcagatttaaacccgtattcgctgttgtcggtatccatccagcgctgattacccttgcgaacttccaacttgaacttgttgaaagtgttcttatcgccataacgggatttgatttgcttgaacagttgcataccctgatcagctaactcttccgtctcaatcacagctaacataaaatcagccgtagcaggtaaaccagcggattccgcaacatcacccatactcacatccgaactatcccatgcagaacgcccaacctgtgcgcctgtccacattacggtattagtttcaacagcaaggccgcgtagttcttcggcaattgctttaaccagaatataggtattctcagcacctttaacacgggttgaagtacagatccccaggtaatcgacaatgatcacatccggaacaaactgtttcttcaatttaagctctttcacaagcgctctaaagtggtttgcacctgcacccgatgtagggtactgcttgaccaccaaacgcccaaccttacctgctttaaggcgctccattttgttcttatagtctgcgtatgtaatgttcccttcgtcgatgtcatccatagtcacatcaagaaggttagcatcgatacgcttagagcaaacatgctctgccatttccatagaaatgtaaagaacgtttttaccctgttgcagataatcagccgcaagagaacataaacccagtgatttaccaacgttaacaccagccatgatgatattcagtgtaccacgttccgcgccgcctttggtgattgcgttcaggatcgggataccaaacggaattttcatcgcttttgattggtaaagcatccaccgtttttcataatcttcgaaatagtcatgacctactgaactatcgaatgaaattgctaatgcttcctccatgatttcagggatagccccaacaccaggaagtttcttgttctgttctgccagtggtttttctgcgttcgcctggatttcgattgcacgagaaagagcacgatacattgctttatctttgcaatatgtttccgtttccttcattagccaatctaaatcttctggcgcatttttcagcgactgaatcgcctttttcgtgtcttcgtagactacatcacttagatttcgtttgtcaagcgcaacctctaaagcagtttttgacggaatgccgttgaattcctgtacatgtttatcaatgaggtcaaacaaaacttgcgcattgccttcgaaatattcctttttcagatgaggccatgcttggacaaaatatgtcccgttataaatcaggttagaaaatattgtatcaacgatcattgtattgccttataccaggttgctgaacatcatgaaaaagttgtaaaccttttgtttgaatacatcccataatgtcagtttaggctttgggacaactgaacccttttcaagctctttaatctgtgcataaattgcatcatgcaccagtgggatcaatgcttctttgtcttcgtctggggtactgaattctactttcagaccatgatcccaaaacaccttatgaatataaaccagatgcgcaacacctttttcatcgttaatcagaagttcctgaataacatctttcatcgcttcatcaatataattctttgctttgctctcgatatccatacattgcctcggttatggggccgaagccccatagtttttataaaatttcgttgtcttcttcgatatcatcaaatgattctgggatatcgtcatcatccagatcaggatctgggatgctatcagtgctgtataaatcttccagcgcggaaccatcactgatttcacgatcagggatcttatacttttcttcgatagctttcaagaatggttgatgagtaaacagaggacgccagaattcaacgctatttgtttctgactcacgccatttcttttcttcaacttcgagttcgccagtctcggtattcaggaaagcacggttgcgccagcctttagttacggtctgtacaaagttcatttccattgccagatccaaaaggccagaatacatactaataccgccttcataggtaacatgcagcgggaattttgatttctctttcacgaatcgagatttttcgatgttcatgatgaaatcataacccactacctcagtaccttctttcacctgttgtttacccaggatgatcgcagtatcagcggaatacattaaaccagtaccaccggaaataactttcttgctgtacatttcttgtgtgtcataggtatgacagatacaaaccatcgggatatccaggtcagccagataaggcgtaaccatacggaacataccttttaatgcttttgctcgcgtcatatcctgtttatcgttatcagaaagcgcgtcagcaagttcttttttacttgcagtgttgcctactgagtcaacgaatacaatcaccttatcaccgcgttcaagcgcgttaagctggcttacaacgtcattacgcaactgctcgaccgtcgtgatacgagtatacacaacacgatccggatcaacacccattgatttcagataggatttagtaacacctttttctgaatcgtagaacaggcacacagcatcttcatacgttttgagataagccgctacagtcagcaaacctaagttggatttgaagtgtttggacgggccagcgaaaagggtaagaccagaagttaggccaccgttaaacgcaccggacaacgccagattcagaatcggcacacgggttcgcgtgatggtaatattgttgaatacgtcgctttcagaaagtacagatgcagtttggctattcgagtttttgatcagtttttttagtagtgctttgtttgacatttaatttttccgatttattcattctcattctatatatctcactagttaatgaaaggggccgaagcccctagagtttaccagtcaccgaacagatcgtttaaactggcacgtttttcataatcaattttacatacttccgtgatattagtcaatggactaataacatgtttttcaaacataccaggataatctacccatgccagaatatcactttcgatctctgacggtagtttatttccggattgccacgcgatgcaatcggcttgccacgggtttttatcccttagtggtagaaccattaccttttcaccttccatgattggcgtaacaccatcaataccagcagtgaaacggttaaagaaaagcacccctttaatatggtttggtgttcccttgattggatagccagccccatcacgatatttcgaaatgttgttggcagatgatacaccagcaatttccctgtagtcaagttccttatattcttcttcgaactttttataatgttcgtgtaaagataattcaccttcttgcaggatacggcggatcgcttctttcaggaatactttcacagaggtcggagtactcgatcgctgtgtttccatacccatgattttcagtttcggtttttcatagcgggttccttcggagtcccacacgttagccgcatatcgttttttagcagtccagaaacttcccaacccttcggaacccaacggaggcccagaaatgatttcacgatccataaacatcaggtgttccacgttgttcatgtattcgcaaagttcacgataccctttatcgatcatcggttccattctttctttagcaaagcgatccaggaagtcaacccaatggttattatccttaaatttagcctcaccaccaacttttgcaatcacgttatccatgcaaacataaatggagtcagtgtcacagtaccgaacatatgcatgatccgtagtaccgcacaggtcgttaaggtattcgtttaccttacgttcaatccactggatagccaactgcccgaacatggtgatcgcgctggcgtttcgtagatcgaagtatcggaagtgttcgttacccaacgcaccataaagggagttgatagaaatcttacggttaagctgtgctgtgttcgcttgtgcgatcttcttctcacacacgcgcttaactgctttaagcatttgttttgtaagagttttcagaactgctttcgattcatcactgaaatctgtatagaaatcaaagtcaggatcaaccatttggttatgtgcgtctgttaagtgttcgagttcgtgcttgatgagttcaagatttcgctcacccgccatcattcgttttttccacatcttacgctgatcaaatactttcttgatctctacggggatcacgcctttgatatcacggcggaacatccacccgttaggagaacagctaaattcatcgctagggcgcggcgcggtcttattaatatactcttcaagagcacgtaccgcaaaacttcccataatcgtttcagggcttatattcacctgtcggatgatggaagggtacaggcttgttaagtcaaacgataccatgtatttgtaaggcccaggaactggatccttcacaaatgccccagggtaaggggttttagtatggcgtctgttttccggaataacaaccttatcttcacgcagagagttataaatgatcgcgtcccacgttttcagcggagacataacccctgggaagttaatttttgcatagtacgctacagacagaaccagttcaataaagtttcgtttaccgtcaatatcaagtacgcggataacgtcaacaatgttgtacgtgatgtacagttggtgatctcgctggcgtagttcagacagtgaaccttcatactcaactttatttttaccagtttcgtattccgcgatcgcgtccagacggtaagatggttgtggggtaaaactgaatttcttatacagcgccataccatccatttgagcaacgccggaaatgtcatatcctaattgttcgttgccgtaagcgtcggtagtggttctggcggttactttaccaaatgggctaaaatgccttaccacgttttgaccgaaaatgttcaggtatcgcgtgatgatatatgcaatatcgaatttgtcagagttccatccggttacaataacaggggttcgctctttccaatctttgatatacgcagacaataacgacttctcggtctggaaagaccgataaacaattttgtttaaatcttcttcgctaatgtcttttcgatcaacgtttgccgcgcaccattccgcaatgccaccctcaaccagatcgtatacatagaatttatcttcaatgctatcgtaatgggtaatcgcatcgattggatattttgcttcacgcggatccggaaattctggggcggtcacctcgatatcgatagaagcaatgcgaatgtgttcgcggttgtattcgatttcattccggtacatgtcagaaatgtaagccagtcgataatcgtccatacctagcgcttccatcccaacatcgcgcatacgctgcatccagtttttagcttctttgatgctgtcaaactgttttttgaggcaaggcttgccataaatgtctttgtatggggtttctacgccattcatagcgtgttgatacattacgggcgcatatttcgtcttacgtacctgttcggtgccgttagagtcaacgaagcgctcataaatggtatctcccatttgttcaactgataggtaaaattcattcattggatcttgtcttctccattaatataatgttccattgtaacaccacctacagcaaattcaagtttactcgatgttctaaaaccaacaaaccttctgctaacaagtcacggatctttctcagttgaacaagctggcgttcaagtttaaacccgtcgaataacatgctgaaaatactggaattgacactatgatattttgcttctgcaattccctggttaaccatcatgatagctttgttaaccattagtttcctttccgttactgtatgttcatccagttgacaggttgcaagggaaaccaaatcatcataagcacgttggtcaataacgttatccatacgggccgcgaaaatcttattcatgtaagtgcggatcattgcgcgtcctccattcttttcataaagacttcttttgcttgttggatcaagcccagagattttttaatacgctcatagaaatgagtggtttcaacttgattgcataacaatgtgtactctgaaatgttacgatcgtaaaatccaggaaagtagtgttgtgcatagctgtaagtgcgggtatctgacagattgcaagttaacgataacaagatgtcatcttttacaatcgggatgatcaaagtttcgttggatttgattgaatccatgatttcgttaatagtcataatatatccctctcaatggtgtacaccaaatataacaaagcccctgcacgaatgcaagggctttttgattagtgaccgatccggtacttgtacttgaggatccaatctgctttttgcgagtgagtcagtacgcggaagttgttttcttctgcaaacttcaacccagtggttacgatcttaaccatgccccactcttcgagaagtcgcgcaatgttgttccggcgtagttcgtcttcttccgtcatatcgacttgacgaccatcaagtttcaacagttctttaaaatgcacgataaaatacttaccttgctttttcagaatgtggcacgattgccagagcattttctttttgttgttcgcaataccaatacgggttagcgtttcacggatctttaaaaaagaatcgtcgctgattagttgaatttctaacatacatcaccattgtttaatcaatttttccaatttcttttgttcagctttgtttttcacaatacccaacaaagacagagcgacctttgcgtgttttcttttccaatcctcgaacattccgaggtctttaagttcctgcaaatattccatcgctgtacgtgtatttacactgtatttttcgcgaaggatttcgataataattttctcttcaaaatcttccgatagtttagcccatgcaccgaagcgtttagccttcctaacagagttgagataatagttatagtgcatttggtcagagatactaccgcctaccagattcatcacataagcgttatatatcgtgtctatgtgctggctcattgcgttgtctacaaagtacttatcatacacatcatcgataaccaacggagttttaccgttgttgatttcgtctatgatgttaaacaaggtgttttctttatccttgccgtactctttgaccagttcttcaaccttatcccaatctttagaaagccaagcggattcatgcggggataactcttcttcatccagaaattccgccaggctcatgattacgcctcccagaccatagaaagcatcaggttcatcaacagatattgcagatgaatttctttattcatcgccagcccgtattgcgcgttgttttcgcctacaatctggatcagtgcgattttcgaatcctgattcacgatagggtaaatcgtatcagtcaattttccgataaaggtatcgtattctgacgcatatttaataacctcagagcgcaaccctttatagttcttttctttcaacagggtaatgatatgagacacatcagaaccaacgatctcatttaggatccccgcatcaatttcaccacgtttcgagtagaacccgatcgctttgataatagaacgcgcatccggataatgctctttaacaaacgctgcaatgactttaggatcatacttgatattctcgatttcaaggataccgaaacaacgcttgattaactgtttcatcagttcgatacgttcagcatcagacggaacaccgaatttaacaggaggacaacgagaaagcagagcactatgcacaccgttaatgttgttcgccgttacaataacagaaacgtttttactgtatgcttcgataaagctacgtaagtgtttctgtgcttccgccataccagaacgatcgaattcatcaatgatgataatctttccgcctggtttctgcgtcattgatgaagcaaaacgatccagttcattacgaatgaagtttacaccacagttcgaaccgttgacaaagaacacctcagcatcaacctcacgggccaacacaagcgcgagggtcgttttaccagtgccaggggaatcagatacaagggtcatgttctcaacacgcccagatttgattatgccccgcatagcggctttgtcaccagaaggtaaaatacactcttcaatcgttgttgggcgatagcgctgatcccatgcaaattcatcaggagatcgggagattttaccgtatttggtttcgatgatttcaatattttcactaagttccataatataccttcaaaataaatggtgtaaaagaaaggggccgtagccccttaaaactatcttacttgaatgtgctacttgcttcaagtacgacgacgtaagcaacgccgttatcagaagagaattttgcggcccctttggaggaaatctctactttgtaatcgctgttgatgaactgcatgttatcaatcttcatatcgaaattgaaaacattgtcgccttcatactcaccgacttcaacggagaaagttgattgactttctttgcttttcgcggtgatgaccagtttaccatcaatcggttcaacggacaggtcggtcagtttcatcatgcgagacgctttgatcagtttttcgaaatcgttagcggtaatctggaaaatcagatctgctactggcatcaccaaacgttttttcggtttcgggatcgttgttgcgtctgctgaacgttcgatgatcttcatcttgtcgccgcgaatcacgatttcaccagtggaaatatcatgagtgatttccgcgtcagtgccgacgatgttcagcatgttcaggaatgagttgagatcgtagataccaacatcttcatcaatcacatcagcaatttcagcttctgcgtatacaacgctgttgattgatttcgtcatgatgaatgaacctttggtcagcatgatcgaagagttgatttgagaaaagtttttcaggatatcaatagtttgtttagagaatttcatattcagcctttagttttcaataagtgttacttaataagtgattttacaacggtttccgctgctgtgtcaagcatatcagccatttctttaacggttgtacgcttaggatcttcgcggcgttcgctggtaagtttacgatgttccgcaaccactttttcatcaatgtcacgataatgtttaaaacgttcctcttgaggcatagctttaaacagttcttttgtttcgtccgagagtttagcaacccaggatttacggacgcggttcatgtagtcaacaaaaacattactttcattcatatatttcttctctaacttagaattctttgagtgggggccgaagcccccgcttgtattacatgtctaacagtttatccaggtcgtcatcaccggagctaacagaatcatccagatcgaacggtacgccgtcatcttcgcctaccggaaccgatgcaacaccaccagatgatttcacatcagatgtctgattgtcaaacttagccatttcgttatcgaagttgctcagttcgctatcaaggtcagcggaagcgctggaaccagcagaaccgatcgaactacccataactttattgaagcgagtggtcaggtcagccagcggtttaaattcgctttcagcggtaatcgggcggagatcgctcataccttcgaaaattgctttctgaacttcttcatcgtcgatgtttttgatcttagccggaacaccaaacgagctatcgtcatagttaggccaatcaccaacttttttcgctttcagggtgaagttagcaccatcaaacggacaggttacagcaatacccggttcatcaagttctggattaccgttaattgcggcggtgatcttgtccatgattttcttaccgaagcggtatttgaacaccttaccttcgttttccggagcgcctgggtctttgacgatcaggacgttagcccagaaactttgtttacgaccgatctggctcagtagcttatcttctggcccgtttttgttggctttagccttctcatacagatcgttttcggaaatgtacttacatgcaggacagccgtcataatcgccgtgggtagaggaacagttctcaatgtaccactggttgtttttcttgaaagagtggctcacgatacggacgaacgccagttcatcatcggaacgtgctgggaggaatcgaataacggcggaaccgtttttctgtgcgtccagggtcagtttccattctttctcatctttctggaagccggaaccacctttcagatttgctacctgtgcctggagtttagcgggatcttgacgtttaaaaatgctgctcatattctgttttctcgtttagtttagtttgattaacgtttgtttcattaagtttcgatattttatgatatctttttcagtaaggtcaaatatttttctgtatgcctttaacttaatgctaaagtcagaccaaataatatcatcagctacttgatcgtgtttatttatgatacctaaaaatgagtcaaaaatcaaaaacgattcgtaagatatcacatttgacaggacaagtttgcttatgtaggacgttgatgatttttcgctgtacttgaacaccagagacacggggatctctttcattttggcgaattcgtacacgtttttaacgtcatccacaaacacgttatctagtctttgtaactttcctatgtactgcctgtaaaagacaatactatcttcatcaacatcgcctacccagaaatccggattggctacgaagttggagaggaatataaaatagatttctttgaatgtaaagcgttgagctaattttacaaagaaatatctatcctttcgcttgttaaaggcgttttcactaactttgatctgccagttgtattgaaggacatcaaaacgcccctggaaatgagttttcatcgccagatataacttgtatacagacaaaggcacaagccgtgaattcgcctcgctatcagcaaacggagctttgaatctcacatgaagccgtccagagtggttgatgaactatgttcaagcgcaaccgatgggcgaagcatgtttcctttgatcgcttcgtcgctaatcttatcaaggatcgcgcgaggaaccgttttattcagcatcgcataatcaatagaattttcatccatccattgtagcgttgcttccatgtaggttgccccctcagaggcaaccagattttcgatatacaaaccgacttcggtcttatttccgatcatgctttacgccttatcgatcatatcatacagttcgatcagttcgttgttttcttcttcgaaagcggtacgggcctgttcgtgatacagtttgaacagtttcccgaaggtttttccatcgataccgaaatcggttttcgctttggatttgatatccttgaacgtgccgttgaagatctcaacttgagttttcacgttggatgcttctttgatcagttcttttacctgttttgctacatcagggtttgtttgtaaaaattctacactcattttgttacctcaaaaatcactcagtttttcgaacatacgggaaagtttgttatccatgaagtaacgttccattttggctttacttccggattttggagtattatacgcttcaataatcgaattttcaatatcttttggtataaattcgaaatcgcgtagttcctcattttctttgtaacgtgcggcccattcaggggtcatcaatgttgtcggatcgtctgcctccagccatgcctctaactcagaggattttaccgctggggcgcgttcaccttcaaccttcgtcacaatataatcatttctaattttaatgcaagcgatactatcttttttatcgcctttgatatttttgtatcgcagatcgttacgtggcgaaccgtacttaggcgttacccattttttctggggaggcgaccattgacgaacaccgttatatttctgtagttgtgtaaagtcgctatcagcagaaaccactaatactcgtctaccttcaccaacagcttttttcgtaacaacagcaattatatcatcagcttccgcgaattcaacctttaatccgagataaggcatattctgacggatttcttcgaacacaggattaaggaagttgttcagacgatcccaatcccattctgattcttcgtgttcgatctgacgacgttttttgtagtaccaggctttttgcctacgccagtaatttctgtcatcgaaggcaatcacgatttctggatactcacctttaaattttacaacgttaaaccgtaaagtgtcaagcaccagatgacgaatcatttcgatcgtgatggatgcttgttcctttggtttgaagttgttcatcagtgtagcgatggaaatgttagagatatcgatgaccatagtatcatcgggttccccttcatcttgcatcagcttgttcaagttaaacatgcttgcaaaactgctcatacatacctcaatttttcaaagaacggggttattgtagtaacttacgaaatgaagtcaatacaaaagaccataaaaattttgatcaataatacttgatctgatcaaatttatgatctataatttattaattaataattattttactacaatgatcattgtaggtcaagtactaaaatcaataaattttatataatttagatctgatctatagatcattagatctactttaaccttaaataatatagaatgaaatttgattttgtctacagttattatataatattcttaacttcaaagaggaaatatgaatactatgactaaagaaacaaccaatatctacgcagacaatgaaaaattataccctatcctctgtgcatggaaaaagcaaatcgccgaaacaggtgatcgcaaaatgcctaatgagttgggggctgctattatggatattgcaaacgggctatcacgtcgttacaacttcaaccgttattccgaagattggaaaatggatatgatcgatgacggaatttccgctgcaatctcaggactgcataacttcgatgaaactcgttataccaacgtttacggttacattaacaaagcatgttggcaagcattcgtaacacgtattctgtacgagaaaaaagagaacgcgaagaaatataaattcttccttgagcacgtttacgactgtgaagattcagatatggttagtattgcagacgaaggtttcattcaagatctacatgacaaactatctcagtacgaggcttccgccaccaaaaccaaagacaaggaagcggaagtattcccaacattggaagattttctatgaaagcaataattgacttaaacaaaatattaactgatatcgattacgaaattgacttgctaccctacttcgtaaaattagagttgcaaaacgtgggaatcccggttatcatcgatccaactgacgtaagaaaccccgatttcgaagtagaagaaggggttttgtcttatatgataaacgccgaaactatgatcatggagatcacttatgattgatgaagagaaagaagtactaaccagtgtggaagaagtggatccagaagaggaaattcgacaaaagatccaggcacgtgtagaagccgacgcattgaagcgagcacaaaaattcattaagaagaaccggactgagatcaaacgcctccgtagacacgcagaggaagccctattcaggggtaataaggttcagtatgtgtatgcggttaagaaacttcgtgatatgctcaaacagccgtatacagaggatttcattgatacgatgtggaacacttcactagcatcaattcgaaatatcgtagcttcacaacagaagcactaacaaacaagtagccccgaaaggggctatgagggtcttatgagaaagtacttaatgatcggggatactcacgctggcttgcgtcaggacaacccctggaatgaagaaaacctatacaatgtattcgtacaaatcgtagaacactgcaaagcaaacggcattaccgaggctttccatgctggtgatttctttgatgtgcgcaaggccaccacacaaaccacgatgaaattcattcgtgaacgtattgtgccactactggaagaagccggattacatatctatgttctggttgggaaccacgattgccagtttaaagacaagatccgccctaactcaccgcgagagattcttgatcagtatgattgcttcacggttgttgatgaaccgatgacagtaaatcttgatacttctccgctgcaatcaatcgatttgatcccgtggatttgtcaagaaaacacacagcagatttttgatttcatcaaaaagtcaaaatctcaatactgcttaggacactttgaactgtccggatactatttctataagaacagtaaagcggatcatgggcttgaacctgatttcttaaagaaatatgatatcgtgtattcaggccactatcatcacgctaacgaaggcgctaacgttttctatatcggtacacctcttaccatgagcgcgaacgatgaggacgaaaccaggggcttctatgagctatcttatggcgacggtaaacgtgaattaactttcattgctaacccagtatgccaccatcgccggatcacctatccggatcaaaaagatgttgatgttgcagattacaaaaattgctctgttcgcttgattgtacgcgaagttgataacgatttgcctaagtttcaaacaaaactggaagaaacagtttatgagttgaacattgtcgatcgcgtgatcactgattcagaagtcgatactgattttgaaatcaaaagtgtatctggattgattagtgagtacatcaacaacatgcagatcactccagaagaaaagaccgaagtatctgcaataatgagtgcattgtatgcagaggttacgagcaatggaaatagttgattacgttaatattttaaacgaagaagggcgatataaagccctttataaaatgtttggatttgatgtgattgttgcagtacagcaggattcctataatgagtatgtgtcattggggttcactctgattaaagacaactatcacgaaacaaaggtttggacatttactgtcctgaatagcatggatgaagattccgtgatatactgctttgatagcacgattacaaacatgattagtgatatatcccaaaggataattgatgaaactcaaatttaaaacattgacttatcaaaatatcttgtcggtcggtaacgtaccgatcgtcattgattttgattcagcaaagaaaaccctcattacgggtaaaaacggcggtggtaaatccaccatgatcgaagcgcttacatatgctctctttggtaagtcatttcgcgatctgaaagtcgggcaactggtgaacagtatcaacaagaaaaaatgtctggttgaactgttgatcgaatacggcaatgatgaatataaaatcatccgtggacaaaagccgaaagtatttgagatctggaagaatggcgaaaaactgccggaagattcagccgctggtgattatcagtcacagcttgaatcaatgttgaatattaacctggtgggctttaaacaggttatcgttctgggtactgctggttatgtacctttcatggaactgaaaacaccagatcgccgtaaattggttgaagatttgctttctctgtctattatcagtgaaatggacaaactaaacaaatcatacatccgtggtgttaaccgtgaactggatacgctttcaatgcagattggacacgtacaacagcagatcgcaacacatcaaaagttcattgacgaacaacgggcaaaagcaaatcagaatacggcgcgttaccaggatatctacgattcccacgtagaaacagcaaaacaaatcaaagcacaattggtcgaactacaaacccagatcgcagaatgtgtgatcaatggtgaagaccaaacagcaaatattcaaaaactgcgtgatggctatacacgcctctcaatgaacgtagaacagttgcagcgtcttgaggtgatgtatcgcaagggtggtgaatgtccggcctgtaaacagccaattagccccactcctgaacgcatggaagaaattgccgagaacattaaaaacggtactcagaaacttacgctgattaagaacaagcaagatcagctacagaaaatcatggatgatttactaacacaacaacgtacactaaatgggctgaaatccaaatacgaatcactacgcggtacacttcaaaatgaagttgcagcggctaaacgtgttcgggctgtcatggataaagcacaggaagacgtggtgatcgacgaatccccagttgaaaaactccgtgaagatgaaaaggaacttgattctaaacgttctggatttgtcaaggaaaaatattttagaggtattgttacggatctgctgaaagattccggcgttaaagcgagcatcgttaaacgttatattccttacttcaataaacagattgcgtactatctggatctgttgggtgctgattatcagttcactctggatgacgaatttaacgaatcgattaaatcgctgggtcgtaatgattttagttacgcatcgttcagtcaaggcgaaagagcacgtattaaccttgctttattgttcacctggcgcgatgtaaccagtaaaatttctggtgttgatttatcccttctgatcctggatgaagtgtacgatggtgcaattgatcgtgatggtagttttgccgtaaaagcactattggatgggataaatggtaacgtaattgttatcagtcatcaggatctggatccgcaagatttcgatcgacatatcaccatgcagaaagttggacggttcacaaagtgtactatcaatgatcgaggtgcataatgttagaaagagaatttgaattagaaaccgctccggaaatagagcggttttatctccacaacaattttcttgaagaaaaacatatagttactatgaaagatgttgaggaagcattcaaagataaccctatagagttgacgcgaatcaagaacaacaaaagttctgtttggttcctcgaaaaaatctattgaccgaaatccataaatacagtaaagtagcccatgtaacgaaacgtgggctttgtttttatttgaggaacaataaatgatcactgaatccaaaatgacttatcaggaagcactgaaagttttgggcgcaactggtagcgaaaccagcgctgaaatgtccagactcttcaaacgtgcatccttacgcaatcaccccgaccgtggtggtagcaatgaattaatgcagaaaattaaccaggcttacgacgtagttacaaaaactgggcctagtggcgcacgttctgagactgctggtgatgttcgcgcacgttatgcacgtcaaaagaaagaatgggaagaaaaagttgatgcttactttgtagtggcgaaaaactatttcagcaccaaatttaacgcacaggaatttgcggaatacttcaccaaatacactggattgcctaccactttcaaacaggaagtaacaaaaggtagtcacggtgtttatgcttcgttccgtttcacttctggtgatgcttactttgatttcggtttcaactgcacccctccgaatggacaagggttagccgctccggattcatctgcactgggtaacgtttctgttagtacctttgtactggttggaactaaaaaacataaaatggcaagccgtgattatcaatggggcaaaaacccagacaagatcactccggaaagcctgttcccgtctaaaaaactggaaagcattttcagccctgtacagaaaaatatcaaatacaaacgtgctgactacctggcgtcattccgtaagctgttaggcgctgacgttagcggaaacgatatctttgttgaagttggtacactgaaagttcgtttctatcgtcacgtattcatgcgcaaaggtgcttatgtgtttagcgcggtgtatgatcctgctgtatctaagtatcgtccggctgcacaacttcgcggaaccatgttcgaagatgaggacggcgcttgcctggatatgatcgttgatacgttcaaagagttgcagaaactgaaaccgagtgttcaaggcgttgtgaacgcgatcgataagatgaacgcagagtttgcagcgggacatcgttcagcatcttttgttaaacgtgtagctgctcaggaagccgcaccaaaaccagaagagaagccgaagcgcacagttaaccgtattggtaaagaggaatacttcgcagcactcaaagatattggtgctcgtgtaatgcctaccagcggttatgttgaatttgataacggcgctggtgttactatcaacttcaagcgtattgttgtaaaccgtaaagcatactactcattcagtagctttgatttcatgtactctggtcagaaacacattgagtggttgaaaggaatcgatatcgcagaagataccaaaggcgcaagcattagcctactcactgatactctgaaatctttacgtgggatctctgactggaacactgttaagagcgctttagatcaaatgaattctaacttcaaggcgggtaaattctccgcacctcatgtgaagaaggaagcagagcaaaaagcaccgaaacagaaagacgaaatcggcgcacagcctaccaaaccacaggcggctaagaaagatacaccggaagtggaaaaatcacaggctgttcatgcagcacgtgagaaagcgaatatgaacaacactattcgtaaaatgatgactatgttagtcaaagcacagcgcaaagacactccggaagatatcaagaaggaagttgatgcagcaattcaattgtggcgcttgacttattaatcaaatgaactataatgggaactgttaacgcagttccctttttatttgaggaaaatattatgagttgtccaacatggttacgtttggaaaatctgaaagaaggtacacaaaaacggatttatattaatcttggttgggttcctcctaccgattttcaaatggctgagattttaatcaatgctgttaaagaagtaagcgacacttacgaatgggaaaggctctattttcctttgattggtttgtatatgacgcgaaataaatttgaagaaatgaaacttgctgttattcgcgctacgattattaattcccaacaaagatttactttgaaaaatgcatggagttctgaatgattattcaagtatctgtacagggtgacactctgactgtcaccgaatccatcaataccgctcttgctgtatgtcgtgaccatatctcacaaaatcctccagtgactgagatcctggaaattgatgtttgggatcagattggtatgatcgacgcatcatatggatttaccccgcgagatgaagaactatctcgtatcgaatcatggctgaatgaacaggaaacggaatgaaactccctaagaacacaacactactaacccgcgaaaaacttcactctgttgattggtgtcctctggatatcatgatttttgatattgaatctcgcgtgatcaatgcaaaatatcaggggtgtagtattttctctgttgaattcgagaagattcgcgggtatgatgagaagtacaaagaaaaactgaaagttatgattgaagcattgggctatattgtaactgttgaagacaataaaatgtggatcgcaatatgagcatagtaaaagcggtgtttgcattggggcacgatatctaccacgatgatttcgcttttggatatcagcaaggcttgccgtggggccactgtaaagaagatttacagaacttcaaagaagaaaccgccgatagcgttctgattatgggtgcaaatacgtttacctctcttccgggtaaattgcctggtagaattcattgcgttctgtctggttccggtagttttttgaaaaccaaaaaaggcgaggttgctgattacgtgatccacggtggcgggttgtctgctgctattggtacaatgcaagcaacacacccagataaaaatgtgtgtgtcattggtggtaaggggttgcttttagattcaatcaataataaaatggttgatgaagtagttttgacacacatttacggacatcatgtatataatgcccccgcatttaaacgcgatgtttcgtttactgcttctgaattgggtgatgcattgttaaaatatgaattttctgatttcgaaactcagtacatcaaagaacatgaacgcattgaaaaaatcatagtcgatcgatataaaaaggtataaaatgaaacaatatctggatattattaaacttgtacttgataacggtgttgaatcaactgatcgcactggtgtaggtactattcgtattttcggcgcacaagcccgatgggatctaaacagaggtttccccgcaactacctgtaaaaaactattcttcaaaccgtgcaagcatgaattgcaatggttcctgtccggttcaaccaacgttgaagaacttcgccggatgacctggggtgaaaatagcgataagcgcacaatctgggatgataactatgaaaaacaagctattgatttaggatatgattctggttatctggggccaatctacggtcatcaatggcgttcgtttggttctctttatggggatgatgatagttattatggcggttgtggtgttgatcagattgcaaaagtcatcgaacaactgaaatcaactccagacgatcgcgggatcatcgtttctgcctggaaccctgttgatcttgatgatatggctctgcgtccgtgtcactgtttcttccagttcgttgtaatcaacggtaaactgtctctacagtggtatcagcgttcagttgatgtcttcttagggttgccgttcaatatcgcctcctatgctctcctgacgcatattatcgctgatatttgcgggtacgaagtgggcgatctggtttggactggtggtgatgtccatatctataaaaatgcggttgaacaggcaaaagaacttttacagcctaaccgttcaccaatgccattaccgattctaaaaatgccgaaggtaaatagcttacttgatttagatcaagaattctttgactcgataaccttagaagggtatcataatcacggctctctaaaagctgaaatggcagtatgaaaaatggggcttcggcccctttcttaacaaggtaagagaatgaatgacattaaagtagtagtaaaatcctctggtgtacgccagccgtttgacaaagaaaaaatatacaaagtgctcaagtgggcctgtgatggtcataatatcgatgttcgtgcattccttgaaaatgtattagaactgatccgcgatggtatgactaccaaacaaattcaacgtatcgctatcaagtatgcagcagatcatatttctgttaaagaaccggattggcaatacgtagcatcgaatcttgaaatgtttgcattgcgtaaagacgtttacggtcagttcgatcctatcccgttctacgatcacatcgttaaaatggttgaagcggggaaatacgataaagagatcctggaaaaatacagcaagcaagatattcaagttttcgaacgtgcaattgatcatgataaggattttgaattttcgtatgctggttcccaacagttaatcgggaaatatctggttcaggatcgcgatactggcgaaatctttgaaacccctcagtatgcgtttatgcttattgcgatgtgtctgcatcaggaagaaactgggttagcacaggttacgcatatcattgatttttataacgcaatttccgatcgcaaactgtctctaccaactccaattatggcgggtgtacgtactcctacgcgccagttctccagttgtgtagtaattgaatcgggtgattctcttggttctcttaacgctgtaacctctgcgatcgtgaagtatatttcacaacgtgctggtattggggttaacgcgggacatattcgcgcaatgggttctaaaatccgtggtggtgaagctgttcatactggtgtgattcctttctggaaacatattcaaaccgctgttaaatcctgttcacagggtggcgttcgtggtggtgctgcaacactgtattatcctttctggcatctggaagttgaaaaccttctggtgttgaagaacaacaaaggcgtagaagaaaaccgcgttcgtcatcttgattatggtgtacagcttaaccagttgatgtataaacgcttaatgaatcgtgattacattacgctgtttagtccggatgttgctaacgatcgtctgtatgatctgttctatgaagctgatcagactgcatttgaagaactgtatgaaagcctggaaaaagatccaactgttcgtaagaaacgcatcaaagcggttgacctgttccaacttttagcacaggaacgcgcacagacaggacgcaaatacattttcaacactcatcacgtcaaccaacagggtagttttacggttcctgtccgtatgtctaacctgtgttgtgagattgcgatcccaacgtcgccgctggatgacgatgataaaatggctggtgaaatcggattgtgtacgctaatggctatcgttctggataacgctgatatcagcgaattcccgaaactcacgcgtattgcagtacgtgcgcttgataacctgttggattaccagaactaccctgtaaaagccgctctgaaagctaaacagcgccgttctctgggtgttggtatcaccaactatgcatcatggttagcgagcaactattgcgactactcagaagcgtatacagacaaagttcatgagctaatggaagcgtttcagtttaaccttctcgttgcttctatggaactggcgaaagaacgtggtgcatgtggattgtacaacgataccaaatacgctcgcgggttactgcctatcgattggtattgcaaaaccgttgatgaactggtagcacctgtttataattgcgattgggaatggttacgtagccagattaagaaatacggcttgcgcaactctactctttctgctttaatgccttgtgaaagtagttcacaggttagtaactctaccaacgggatcgaacctccgcgcggtttagtgagtatcaaatcttcgaaagaaggacactataaccaggttgtgcctaaccagaataaccagattgatttctatgatctgctctgggatatggctaaacgcggtaacaaagggtatctgtctcatgtagcagttatgcagaagtttgtcgatcagtctatttctgcaaacaccaactatgacccggcaaactatgaagacgggaaagttaaaacagaagacatcattgatgatctgctgtatgctaactactacggtgttaaaactctgtactatcataatacgcgtgatggtgctggtgatgaagaagaagccgccgaagattgcgcgggttgtaagatttgattaatgccccttcgggggctttttaaaggtaaagacatgttaacagtaatgaatacaaacccagatcataaccacttagaacaacctatgttttttggtgaagatactggtgttgcacgttatgaatcgcagaaacacaaagttttcgaaagcctgacgcaaaaacagctttctttcttctggcgtccggaagaagtcgatctgtctactgaccgtatgcagtatgcaaaacttcctgaacatgaaaaaatcattttcgattctaacctacagtatcaaaccctgttagataccattcagggacgtgggcctaacctcgcatttttgccgattgcatccgatgtgagcatggaaacctggatcgaaacgtgggcgtttagtgaaaccatccacagccgtagttacacgcatattcaacgtaacttgcacattgatccttctgtacagttcgaccaaatccttcgcaatgaagcgattatgaaacgttccgcatcaatgacacggtattatgatactctgattgatgaatgtcataagctgaaaaccatcatgatgctacaggaacaggttagcggctataaaccaaatgatccggctgtcgtgtattataacgagcaatacactaaacaggccactaagtgcaaagaagcgctgtacctttgtatgcacgctgtgaacgctctggaagcgatccgtttctatgtgtcgtttagtttcacctttaactttgccgaacaaggcaagatggaaggcaacgcgaaaattatgcgcttgattgcgcgtgatgaagcattgcatcagaaaggtactcagagtaaaatccgtttgtggcaaatgggtaaagatgatccagaaatggttgaaatctcccgtaggctgaaaaaagaagcaacggctatcttcctggaagtatatgaacaggaaaaagaatgggctgaacatttattctctgttggtgatgtagaaggtgtatcgctgaaaagcactatcgcttatattgaacaccttacagatcagcgtatgcgagcggtagggcttgattcaccattcaccccgatccctaacccgtatccgtggatgaataaatggctcaaaagtgataacgtacaggttgccccgcaagaggttgaagtaagttcttacctcgtcggaaacctgaatactgaaatcagtgatgaagcgtatgcaaaatgggccagcaaatacgcgtgattgtcgggtagtaaacaagtacaaaactgattgggatgtcgatattcaaagaggtacgaagttcggcaacccttatcacacaggaaccaggggagaaaacattttagcgtttatcccctggttccagaatcaggttcgtactggggcgatcacgattgaagaattgaaagaacttgatggaaagaggcttggttgtacctgtgcgcctcttccctgtcacggtgattacatcgcgcatgtggttaatgttttgtgtggtaagaaaagatcacttgactttttggatatataatgtatgaaatctgaattcaacttaacccttgataaatgtggtcgcatcgatcgaagttttgttaagtgtggtgaacttaggcattgtgtttattttattgcaattaacgatgaaatagtatatgttggtaagtgtagggatatgtggaagcgtttagacacatatcgcaatgcaaagtattggagagaagccaaccccagtaacatcttaaaaacgtgtcgattggaaatggctatcaaaaaacgaaaaactgtgaaacttatcgtgactactcacgatgaaaatacatatcatgattatgaaatcaacatgatacgaaaatacaaccctgaatggaataaacagcactatgacaaaggcacaaactaaaattatcaataccctttacaaacaactcatgcagttgtgtggtgaatccgaaacatttttcttcgttgatcaagtaaccgtgatgggtacacctgttcgaatctttaactatcgcatggcctcatatacagactggctaaagcctggtgctctggaatgtcgcggtatcatgtttgaaatggatggagatacccccgtatcaatcatcagccgccctatggagaagttttttaactatgccgaggtaaaggcatgggaagcgcttaacgagtctcctattgaattaggcgaagttttagacgtgatgattaaagaagatggttccttgatctcaactttccttgacggtggatttctggcggtcaagtctaaaggttcggttaaatcagaacaagctatggatgcgcacagcgtgttaatggcaaatcgtgaattgctgacccgcttaactgagattgctaaagaaaactatacggtgaacatggaatacgtttccccgaaaaaccgtattgtcgttggttatgattctcctgatctgcgtatcctgaacgttcgtcacaacatcacgggtgaatacatcccttatgatgaactctttgctgacgcgctgttacgtgcgtatctggttaagcgtgagaatatcgaagtactggatctggatgcattcgcaaaagaagcatatcagaatgaaggattcgaaggctatgttgttctgacaacgaaagggtttgtaaaaatcaaaacaaactggtatgtcaacctgcatcgcacaaaagatagcatcaccaacaataaggatcttttcctaaatattgttgagaatacggtcgatgacctgaaacagctattcagttcggatctggtctctctgaaaaagattgacgatttcgaaaaacttttccttgatagtctcaatcgtttgagtgcaaaagcattcaaagctattgaagataataaagggaaatcgcgtaaagattttgctatcagtctaagcgcggatttgtcaaacgacggtcggatcatcttcgggcctcttatgaagtacttcgaagaaaccgatccgcaaaaactggtcgaccgcatcattgaaatgatggttaaaaattacgaccagttcattcctggagagtacaagtgaaatcatttggcgcatatagccgaacgatagaacaagaaaaagcagggattgattccctgctttctttcgttgatgttttccccgaaactggaaaaatttactggaatgataaagcatatcataaaagtaagagaggaaaagaagcgggttctattgtttgtgaagaatacccttatacgaaaataaagtatgctgggaaaaattacatgaggcatagaataatattttactatgttcatggttacttaccaatcatagttgatcataaaaatggtcttgattttggtgattgtattgataatcttcaagaatccgatcccgttcataatatattgaagaaaaacaaaaccagaaaatctaaaactaccacatcaaaaggggttgactatcgttcttctcgtggaaaatatagagcacaaatacggattaatggtaaaacgaaacatataggatattatgatacagaagaacaggcgtctatcgcatatgaggaaactttgaatgaatatcaaaagcatcttgggtatgattaatataaaatcgtggatatggcctattattgttgcttgctccctaatagcccttttttacattgcagttgataccaaaatagaaaacaggcaattgtctaaggatatcaaagcgttacaagctgatatcaagaaagtaaaagagacaaacaacagtaatacagtgatatacgtcgaacagaaaggcaaggatcagcagttagtgaaagatgccggacgtaaagatctgttgttcaaaaaaccaggactgatcgaaatcaagatcaacaagtcctttgaagagtatatgaaggattacgaaaaatgaaaatcgctacactagcgctcgttctgggcgttctgttggtcgggtgtgctgagaagccaccagaaaagattttgcctacgctacccgctaaggtgaatccggtcaatgtgaaatggaaagtggttgcagaagtaagggaaatcgacgggaagaaatatctggtcatgccttatgatggtaatccatacgttgccctttcatacccagattcgttaatcttccgtagctggatgaatgacgttaagcgtcagaaagaccagacggataacattctatgcaccgtgggataccccgaaaaatgcaagtcaaaataattgatacattctttgatgacttgacggtcggaaaggtgtatgatgctgtagaatccaaaaatgaactatggattgatagcgattgggggattgcagtcaatctgcataccgaagccagtcaagaactaattgaatatgagatagtgaaatgaatctgtttatgactattggcgttccgggtagtggaaaaactacctgggcgcatgagaaagcccgtgaattgggtaatactgttacgatctctcgcgatgatctgcgtagctctttgtataatgcgggtaaaggtgctggcggatacaaatacaccaaagcgaaagaagacatgattgcagaaatgcaggatcacgttgttatctccactctgaaagatggtaaaaacgtgatcatacacaacacacatctgaaagaaagtgataaaaatcactggcgtgaaattgcgttggaacacaaagctgattttcatattgaatattttgatgtgtctattgttgaactgcttcgccgtaaccacaaacgcggtcgtgatgcattacccgtttcgcgtctttgggaaatgtttaaccagtatcgtaagatccgtgggttcgtaccagcaatggaaattgtcaatccccacaatcagaaatgcgtgatctttgatgttgacggtacgctaacaaaagtagggcaacgtagcccgtatgactttaccaaagtgatcaatgatccgccaaacatcccgatccagcaactgtttcacctgtacaaaaatgcagggtataagtgtgttgttgtgtctgggcgtgaaggtaatccgcaatgcgcacatgatacatgggttagcctgttgagttatggcgttgaaccggatgaaatttttatgcgtcaagaaggtgataccaggacagattttgaagtaaaagaagaaattttgtttgacaagattttagataagtattatcctgttattgcagtggacgatagagacactccggtcggaatgtggcgagcaaacgggattccgtgcttacaagtcgattatggtgatttctgattgacatataatgtgggtatgttaaagtacccacacaaaagaggattatattatgaacgttattcgtgaagataaacacatcatggttgaacttggcgatcgcattcgcgtagaaaatctgggcgattttaaccaaaaagttcgtttgttgtgccaaaaaattgctaacaaaattcaggaacagggtaaagctccgggcgggtttgaagttagcgccactccggtttctcagtactcctatattgtgtatattcatgacgtggatactaacagcacccaatctttcgggctggtgttaaatcctattactggctacgttacatgggcggctgtattatgaaagtaaaagtaattgatagagcgatgatcacggatgaatctgtatacccagatcctcgttattatggcggtgttttcggatacatcaaaggaactgatattgatgtagtaacaagtccgatcgccgaatacgatatcaacaaagatcagacagaagttcgcgttactacaatcaacggttcagaatatatcgttgaagcgactcctgattttatcaaacagttactaaaggtgatgaaagatgcttgatcatcctggctctatgagcatggtgcttctggaagcattaaaagcatatgatattccttgtcatttcggtgaagtaactgttaatactatcattgacgaaatcgacaacccaaatactttcattgcttgtcttgttcgaaaattcacaagttgttttcgaccgagtccagaaaaagtagtaatcagttctgtttctgcacatcatcgagtgttagatgatggaaagattcaactttactggaaagttctttatcacgtggtgtatcatgaagattgatgatattatgtttatgcttagagcaataagtgcttctaagttctctcaatgtgtctctgttaatgttggtgctgcattgagaaatggtaacgggcgtgtgtttgtaggcgcaaataatacggttgatcctagtcatcgttgtacagatcagtgcaatcacttattagatgataatgggaaactgagtgaagaaaagcgccctgaacattcacaatggtcagatcgcaacgaagtacacgcagaaatgcgcgttattatgctggcggcgtctcatgaacaaatcaaagacgcaactttgtatacaactcattccccttgctcacaatgtgcgaaaaatatcgaattttgtgttgcaacaggtatgattaagcgtgtagtatatctacataaatacgatcgtggtggcatcgagtggatatggcgtctacagcaatacggtgccgaagtagtacaacttgaccccgaagaaatgaataaacatttccggatcaaataacaaatgagtaaatgtatgtctgaactgagtgtaaaagcatcctttgaatatgttctgattgaaaccaacgctaaagcggctggaactgaaattgtatcaccttctggtattgtgactggtgttcgtcaacacggcgaggaaccgatctacggcacagtgttatcatgtgggccggatgtaccggaagaatataaaaccctgcttatgggtaagcgcgtaccgcttcctcatgcacaaatggcaaacgtgccggatcctgaactgattgcaggaaaggcaacaaaagaagaagctcgcaagtatccggttaaatatgtaaccgcacactataaagcgattcaagcaatttacgaataagagatccaacatggctaaacaaattcaagcaatcatcgccgataccgtcgcaaaatccaaaaaacttttcgacaaaggcgacatcctcgaagcaccgacccgcatcgatgtaatgacttcaatgatcattgatgctcaccagggaaaactaaattcccgtgcttcggaagtaatggaatacatcgtacagttcgaggatgtatgcaaatacgccaaagctgttgatccggctgttcgcgaaatctaccgcaaacagttctaaaaatatcggccccttagctcaataggtagagctaatcactcataatggttaggttcccggttcaagtcacgggaggggccaccaaacaaggcaaggcacttagagaagcgggaggaacagaatctgattctgttggttgtaggtgcaaatcctacccttgccaccaaattagggtgcgtagcgcaatgccgttaaatggttcggaatatgcaacctttctcacggagaaggctctgttggtatccggtaataggttccccggaatgcggggtgaagtaaagaaactcccagcccactaattttaatgaggtttatatgaaatttcgtgaaactgtgaaataccataacgcggtcgaatatacacagatttttgttgatatgtctcccgcaaaattcaaagaacgttatggcatgacatttaatgaatggaaagatggattgcccgatggggactaccgaaaaaacttcaaattcagtgaatgttatgtagatgacgatccttacgatcaggatattttcggtaaaacaacacctctcattgagaattcaccagaacagctttacgaatcttgtattgattccgcatacgaaatttaaagagatatcatgaaaaatttacaaaaactgtttgaaatgtctccggcaattagaaaaatcatcggagaaaatagcaatccaacgaatcgcaataaaaaattgatggaactttttgtaaaagagttcgatgattttgattctgaacttcataaagcgcttgaggcatattccaaacaagggttctttgcatcgccgcaagtaaatagcaagaaagagtatagcgaacgattctttgattgggagattgtcaatctcgttcgtagaacaaatatatctccgagcaatcaccaattgatttctcttgatacttcggtattctttatccagtatcttatcagtggtggtttcaaaaatcctgaaattccgtttacaaatgaagcggttagcagtgaatttgatgaatcatttgtatacatcaacacaaacaaataatcaaatggctatcttcggatagccttatttttggggtgtctatgcgctttttaaagtatgcaagttggatcgtactcgtccctcttgacattattactggagtattagcaattctgtttgccccgtttgttgtaccgttctacaacgagaaaacagggcatcttcctaaaggcttccggtggatggaaaccttcgataaccctattgatggtgatggtggacatatccgccgttgggcgtctatacgctatcatctggggggttttggggtatacatgcagcgtgttggctggttgtggagaaacaaggcttataacttcgcatatcacgttttaggacgtgaagcgacaagcaaattcaactggaaaggcaacccaaaaacagaaggtgggccaaaccccgtaaatcatggctatctgctcatgtggaatgaatcagcatggggtttgtacgtttacaaaccgtggctacagatccacaaagtgcaattctgtttgcgcgtttatgctggatggaagctgaaacaagaagttagcgacccagttaacctggatcgtgcaatgctggcgtttcatttcaacccgttcaggtattatgtaatcaagtaaaggtaatacaatgaaagcatttcaaattttagaaggtttgcatactggtacgatctatctggaagaaggtaacgacgttcggatcgtagtatcaaaaacattaactatggattctgtgatcggtaaagctcgcgttactccgtttgcaaagcgagagattgagatcgaatatcagccaactgttaaggtggaaggtggacaacatttaaacgtaaacgtgttgcgccgtgaaactctcctggatgcggttgaacatcctgaaaaatacccacagttaacgatccgtgtttctggttatgcagtacgttttaactcactgacccctgaacagcaacgcgacgttatcgcccgaacctttacagagagtctataatggcaattgatgatatcaagggttataaaccccatactgataaaaaagtagaaacggtaaaccgtatcaaagatgctgaaaatgcattaggtgcaatcctggaagatatcgaacagcgactatcaaattcagatattgattcactgatagaggaagaattagatgaggtgcttgaacgtatccatcaaattcaactagcgaaagaccgactgaaagaagcctctatgtgggcgtgtcgtgcggtgtttcagcctgacgaaaaatattaaaaatcaagccgttgccgaaaggtagcggctttttcttttttggtgtaaaaagttgttgactcccttctcacattcccttatagttaatcccgtagacaagaaaacacttttatgaggatgacattatgaaacgctcttacaacatgaatgaactggttttcttcaaaactcgtcgtgaagcacgtgcttacgttctggcggctggtaaaaatacttctgctgctatcgatatgggtactgataaagctgttggtgctcgttgggccgctgttatcgttatcgctgctccggttactccggttaaaactctggtacttggtgcgcgtcacgccgaaactcttaacactgctgcaagcggtaggggccacgaagttaaagtgttcaagaagcgttcttatctttcatgtgcaaggggttaactatggcacgattcatatataaagtggaatatgaaaataccgagttatctgatacctttttgaagatgattcgtgatcacgggcaacgtctggaaagagtaacgattgatactgcgtttgattgtcctgttgggttggttctaacattatcttgcagccctgcaaaagaatcagcccgtgtcgaaatgttacataaactaaatgcattttatgaaggtggtagtgtatggcgagtattgtaaaatttttcaccgactcagtgaaagaaattaaaagcgctctggaacaatggaacactcgttgtgatgtatccattaaatcagagtacgaaacaacttatgatcgttatgatccggcccgtggtttgcacaataacccccatgaggtggaagtgtgattgatatcgaaacaaataacgtgattcttgtcatagtatcttttatgttgggatactgggccgcatcatgaaatactacggattcaaaacgagtcattttggtaaagcgtatcgcacagaaaacatcgatcgcaaacgtccgtactatgattcgttagtacgagcgggacgtaaacgcgctcgccaggaagggaagaaagagggtgaagatcgtggataactggaaaacatggatatcaattatcgttggtgttatcatcggacgcggtttgtatgatttaatcttttcaataggggttaactatggacattggttcgggtagtcagtacccatcatgcgcgttaagcaacttcgctccgcatccgtttacgtttgacggggtagaatgtgcatcaatggagggctttttgcaaagcctgaaatttagcaacccagatatgcaagcccatgtatgtactctggtaggcaaggccgccaagttcaaaggcaaaaagaaaaaatggtggactaaccagaccttatactggaaaggtatccctattcatcgttcctctgaggcgtatcaaatcctgattgaaaacgcatataatgcattattccttaatgaagggtttcgccgtgcgttggcagcaaccggaaaaagtaccttgacacattcaatggggaaatctcgtatgaacgaaactattctgacagaacgagaatttattagaaatttgaacaggttgagaaatttgttatgaaaagcgctgataacataaaaaaagaaattgaaggaatcaagaaattattgcattatatcgatgttgatatagagactggaatatgtacttggaaaagacccagaaaatctataaatgttggtgatgttgctggatgtaagaaagaaaaatatcatgttatttgtttcgattataggttgtatagacgacacaggattgtgttctattttgctaaaggttacttacctcaagtagtagaccacattcatggtgttgaacatggcgacggtattgataatttacaagaggcatcgcaaagacaaaacgttattaaaaagaaaggacagaaaaacaacaaaagtggttatcgaggggtgtgttggtcgtctcgtgctgaaaagtatcgagcaactataggtattgatggaaaacaaatacatttaggatatttcgatactccagaagaagcaagtaaagcatatcatcaaaaagcgaaagaaacttttggtgatttttataatccattggttaaatgagatctgttatgagtgaaaaagaaagagtagaatgcgtgttcctgttcaaaggcgcgattaatccattagcgttactgtatgcgcaacatgcattacgttcaacgttgattcagagtgttatctataaagcaggtgtgtattatgttaccatcggcgcaaataacatggttgttattgaatcctacgttaaggaatgtgcatcaaacggcgttgtctttgataaagtcgattttgatgctggggtagatgctgtttatatgtataagggttgatatgagttacgtagtttattttgattgttcggatctcgatccgttcgtgcttcaacaggcaaagaaatatcatcaagatgtcgttggcattggtgtaacaaatgatgatatgttgtgcatcgaatttgaatattatcggacatttgagcgtgaacaattcctgggtgaattgaatgcattcaaaagtacccttttctttgatcgttatgaggttatatcttgaaacctgttattcttaccgatattgacgggatcgccgtaaaatggcaaagcggcctcccgttctttttgtctaagcacaacatgcctactgatattgcattagaaatggttacagatgaaaaatttcgtgatatgaccgaaatcttcggatgtgatcagcagttggctaaaatccttatggaagaatacaataacagttctttcattcgttatctgaatgcgtatgatgatgcattgattgtgatcaaccgtctgaaaacgcaatatgatttcgttgccgttaccgctctgggaacaacaccaacggcaagccttaaccgaattgctaacctgaatactcttttcccgtctgcgtttaaagaggtgatggtcgtgggccacggtgaaacaaaaactcatcgttacctggaagcaaaagcaaagtatggtaatcgtctggtttgctttgttgatgatctcgcgataaacttaaacgaatgtcataacgtcattagtcagttgccgttattccatatgttacgtggtgaacgtgaagaaacaaatgcacctcaccagttagtaaaatcgtggtttgaaattgaagagaaactaaatgatcttgtcaatccttaatgaacttgcgtctactctgaaaaccaaagagaaagaagcaattttaaaacgtaatgccgataatgaattattgaaagaagttttccgcattacgtatacaaaacagattatgttttatgtgcgtcaatttcctctggtagaagggaaaccaggcacaacaccgctttccgatgcaatcaaagcattactggaagatttagcaagccggaagtatacaggcaatgcagcgcgtgatcgtttactggatattgtatcatcagtgaacattaacgatcgtgaagtgctacgccgtatcattaaccgcgatctggaatgtggtgctggtacaaccttaccaaacagggtatggaagaaactcattcctgaacagcctcaatgcctcgctacgccgtttagtgaaaaggctttacgtcgcatcattttccctgcttactcgcagcttaaagccgatggtgcgcgttgcatggctgatttgctggaagcattaaaccgtaaggtatcgagagcgggtaacgagtacgaagggttaactcagcttgatatcgatctgaaaaagattcgcgattatctgggatatgatgtagttctggatggagaattgatttatgttccttccggaaccgtaccaacattacctgaacctgaaacagacatgcctttttctttatctgctttcatggacgatgatgataacgacattgcgttatttgcggaagaagttcgcaaagtatcgaccccagaagaagaacaggccgaagcaaaacgcgaagaagggaacgggatcgtaaacaaatctctgaaagggacgatcaccgaagaagaacagcgaaacattgtttatgttgtttgggatattattccatatgaggtgtattacggcgaagctgaaagtgttcagacttatgatgagcggtttagcctgttgcgtgatatcctcctggatctttctctgccttctgttcgtttgattcagtctaagctggttaataacattgcagaagcgaagcaggactataacaattaccgcaatgacggtaaagaaggttctattctcaaaaacagaaacttcaaatggaaagattcgcgagtagccgatcaggttaagctgaaaaacaaaaccccgattgaactacggatcattgatatctacgcgcacactaaagaagaccataaggtcggcgggtttgtggtggaagatttatccggaatggctcgaacgaataccggatctgggttaactgataccgattatcgttacgatgatgatggtattacccgtgtatacattccattagatgaacgtggtgaactggatcgcgaatacatcatggcgcataaagatgaatacattggggccattgtagaaatggaagttgacggcctccagaagtcgaaaacgcgtaagaaaggggaaccggaatacagtttcttccttcctattatcaagaagataagacgcgataagaccgaacccgacgatattcatgttgtctttgcagatctattttgataaaaagcccttgactccggtcaggggctttgttatattgcatatcgaaacgtaaatcactaagagaatatattatgactagtagttatcagaaacataaaacccttatggcaaacctgtccggtaaacatatcgacgaagtaaaatctctgctgacagtgaccgaaggttcccgattcgaaacaaatcacgttatcaaaccttctgtgaagaaagtactgaaagtgatttaccgacatccagtgtatcagtgcgtccatatcatgaacagcaacgcatttattttcgtatataacgaatccgatgataagtgtgttggtattttccgaaaacctaactttgaatgcatgagcgaagcggctgttgcaaccccgatcgttgaagaatatccggattatgttcaacgcaacatgcgttatgtgcaatcccgacttgattatgcatacgatttcaattctgacgcggtagaagcgctggcggatatcctttgcaaaaaccagaaagatcgtcaaatgacaaaatatctgactgatccaacaccgacaacaattcgaatttctgttgaagttccgtttgaaaatcatttcatggcagttgaagcgcttgctaaactcggtttagaagtgaaaacagaagccgtttaatagcactttttgttaaaaagcctcttgcaatgcagggggcttgtttggtatagtgtgttcatcgaaacgaaacagacaaaaggaacatcacatgcaaatcactaaagaactcgaaggcaaagtaatcgttctggtaaataaagaccgtttggcacaactgggtaacggtggtgaaaaactgccagcggacgcactcgaaagcctttctaaaatgcgcgtgatgcgcgttactgacggttgggttacttgtctgcctctgaacgacgaagacaaagccgtatacgatgcacaagcggattcatgggatatcgaagtacctctggtaaacatcgaagttgaagagtgctacgaaatcgaaaaataatgcttgtgttctgggtaatgtaatggtacattacctacatcgaaacgaaaggagaaacatcatgaaagttatgcacactgcaaatcaacttcaaaacggcaactacgctatccacgatgctatcggtgcgctggttggggtttatcttcatggtatcaaactccttgaagtaagtgggaataccttttatggtgttgaaaacatcgaagcagcgatggaaattatcggtgacctgaaatgagtaagaaactcgaaatattcgaaactatcagcgaagacccgaatcttcgctggtgctgtgcgaaaactgggtttgatgctgcatggggtgatactccagaacaggcgcgtaaaaactgggaacaccaacaattgttttttgcctgtcgggttcctaccaattatgaggggagtcaattgttagcatgaaaaataaagaatatgacccaatagaagttaaagagcggttatcggtagcaagaagattccttgaatctatcgaccctgataaacttggaaaatgccctgatacgatttgccttaattgtgggcgttctgttcttgttggtaagtgttgcgataatccaaatatagttgtgatggaaaaggaacaagtatcccccgaaacatgggatcagatccaggaaatcattaaaaaccctccagcgccaactaagaaattacgtgaattgatgacaaggaaaatgaaatatgagcaaatttaaattgagtgcaaccgttcgccttattcgttggaatggtgaagagatccgttatgatgaccccgaattcgcccatgaaattctttcgcatcgtttgggattgaaaaacgcgtcattggttcaaactgttaaaacatcagcagagccggaaatttggcgttgtgttattctggatctcgataacaacattgattatgatgatcctaagaactatccgcttctggaagcacaagttgagaatgctccagaagacagacagtgttttttggttgagttgccacgcgaacattacgaaaacatcataaaggcccgtaaaaaggtcaataacaatgttttcgatctccacctcggattgtttgaggattaagtactgctagttgtgttcgtagtagcggcgctggtaggttcccccacctgtatacattcaagtgtttgcaggtggaaatcttttgatacgtctcgaacacattcaacgatcagatattttcctgcatactcttccccaaatacctcaatgattgcccctaccttaacatctaaacgaccctgctttatatcgaatcggatccggcgttcatagctggataacaattgcattttagacgcctggaaaggtttaccttctgaatctgggttctgaaagttggtatcatagattgcattacggtttgtgaagatccatgtattctctgtgtctgtatcagccagtatatcaccgtacatctttttatcagtcaatgacagactaaagaaactggcgtctttaaacagcgttgtgttatccttatgggtaatgtactgggcttctgtgaatatgacagtatcgccaacaaacacgttatcaacgttaaatttgtatgctgggatcggtgtctgggccagaatgtcagttgaacttttaaggaaaataccggaaccatcttcccacagataacagaaatcagaagaaactacactttgcccgttgtccctgatataatcgaatatatcctgatatgtaccatttagacatccaggagggatacgtatgttaccgccgtcaacttcgggggtaagtagtttcattttgctatacagtgccgtcatacactctgtaatcgtctgtacggcgttgttactaaatgaacgggcaaacttacgtctgaacgttttatgcagcggagagaggttcatacgcagcacagagcggtttttatcgtcagtatctacgttagagtaaagcaatccgtaataatgttgttcctgtgtaccgttatactggaaagatacctgtatgatcggctggataagttgctgatagattaactgtgcgtcgtatatctgcatcagcgtttccgatgagccgttaatcatcgtcttttcactaaacgagacaagagcgggtagcaattcagtatatgcgttatcaatgtatttttcgtatgatgtatataatttaatcgatgttattcgattgacgattttttcagccataaaaatccctcctaatatatcctatttactaaatagtaaataatgacccaggttcaatttgaggcaataatgaaaaataaaactcttgataaatttatgactacacggcttgaaatcaagaagactaacgttaaaaccgttcatcttccggatggaacagccattgagatccctaagatgtcgtatcgtcattttgtaaagattaagactctgaaagatgacccagttgcgatcatgcgattcatcattgatgacatcaaaccgcgtgaactaacagcagcggaaattgaatttgtgttgatccatatgtatgcacacaataacgctgattatgccaatacgcttaaagaaattgggctaaatcttgatgacctcaaaatctccgaaccttgctatgattttacgtttgacaatgtgcggttagtctttgacaaacccagcctgttaaatgctcaccttccgttcctcatcaaagaggcatatgttgacggtaagccagtagaattaactgaggataaacgagacgaattaattaattgcctgtaccgattcgaatatgatcaggtatcgcgtggtgtcctccaggaagtatacattattcatgaggggaaaaccatcaaagggcttaacatcattggtgaatgataatggctaactcttatttcaacgaagaacaaaagaaaaagtttctgaacagaaacaacaacaaacaaccagcggtcaccaaagtaacagcctcccttgatgctgaaagcgcccgtgacctaaaggaaatcaacgataacacccttgaaagtgcaatcaatactcttgatatcaaagaggggttgaaatcgttcgaagaaaaattccgtgacaaattcgcggggttcaaagaacaatacgaagaggataaaaaggaatcattagccgaacaactacctgatttcgttggcccgatccgtcctatatccttaaccgatgataattcaaaaactgttgacaatacagtaaacgttaaccaaaatggacagttcggtaagctggaagaaaacaccgaatctatttttcatgctattaacaaacttgttgatttatatgaaaatactgataagcataagccgcttcctgaaccagtggaagaaccagatccgtatgtagacactaagaaaaaacgcatcaatgatgatgatgacaaaagaagcaaaactctggatagcattgctaaaagtctggtttctattaaaggctttacatcgcagatccttagccgtttcattggttactctctggaagcaatggcaaagtttgctaaatggacgctccttattggttcgttaatctttacattcgatgtgttgcgcgtcacaatacgcaaatggttcgaagatatcctgaaagaaggggaatcctcaaaaaaactatttggtacatatctgggtaacgtaaaggctatcgtaacaaagatcgaagaaggtttgaacaactttaatatgaacaacttaggcgaatcacttcgtgacttgttcgttgagcctatgaagttattgggacaaactgtacaaacggcaatcactgagggtatcggtcgtcttattcaatcattgggtgaatcaactggtatagacagcattaccaatgccggacgcggaatgcagatcaccgctttacgtgataaacagaaatttggtcttgaattgactaaagaagatattcttatgatcaagaaacaggaactagaagaccaaaaagcggcattagaaaaagaagataaagctattgcagcacgtcatgcattaacaataactccttctcaaattcctaatggttctatctataaagttgctcctactgattatcaagaaagaaatcagaaaaccgtagatgctgataaagaacggcttgataatatgaagaaagcaacggaagaaatgcagaaacaatacgatttagctaaaagcagcgaagaggaagcacaaaaattagccgatgaggaaaacaaacgcaaccgcgcacgtatagaagaagcaaaaaggttagaacaagcgaggaaggaaggaaaacagccgccagaaggtgaagagaaaaaaggtgatgatctgttgggtaaagcaaccaactatgctaactctgaaaatctggatgcagccgatatcaaatacattaacgatgaactgttggatcagcttgaaaaacgtcgtaatgaaggtaatctggacgatgtacagaaggatagaatctctgaccttatcgagcaattgcaaaacaagattgcagcccgtacagaatccagcaccccgatcgacgcacagccaccgttagcagcaaataaaccggatgctgataaagcaagcaacattcaggttaacaacaaaactgttaacaacaacgtaactcattcagtacaacgcacagagcataaaccgctcgtagcgctggcataaggaacatataatgaagttttctattattgatgacagtataaacactctcaaaaatattaaaaatcgcggtatcccctctgggggtgccgcaatcacagaatcagtattaaagcaaactatcgttaccgccgaatttccggcccaacgtgcagcaggtatcgataacgcttataatgcttcgagtctgtataataacggccttctgttcactgcatatgattttaatggtgttggtagtaaagacaactatcgttcattacgtcaggcagcacagaacccaaaacaaatactatcatctgcgacgggtaatgttaagtacaaacaagtgttgaatagttctattggtactatggaacctgtttgccagatcctgctaccgcgaagcctgaacgataacgaagtaaacagccaccgctatcaagatgcaaacgatagtttcttaaccaaagggttgagccgtgttgtttcaaacatggtatggggcgctgtagaatccatttcaggcggtattatggcagaccgaagagaagcccttgatgttggtactaaagccgctttccagggttctgacaagcgaacaaagatgtattacaatacattcgtgatcgaaagccgtaatgatttgctggaactgattaaaatctactatctgtttactgttctgggatacggtacaacttctggcggtactgctaaagaggttgctgcattggttaaacagtattacggtgttctgggtgctaaaaccgcgaacgcaattagcccttccagtaacccagtaacagcgtcagattttgataatagtctgggtaatgacgtggttgatttcatttcaaacgtagaggttattaaatcgcctcctgtctggtttattcgtgatttccagtctggggattccttgcgtttacctcattcaacctttgggccagcaggtattaccagtgttcgctttggtcgttctattgataatattgtaaatacattaagagaatcaccaaataccccgatctcacttgaggtcgaaattcaatttatggaactgatcgatatgcgtcaggattctatttttgatacaaattactaaggagatatgatgttttacaacgtagatgaatttttatcaggtatggctaatcgcgattttcagcgtagcaacctgtttagcgttgtatttgcaaccagccctgcatcacgtatccttgacaacacgatcggtagtattcgagatactttgattgatggatctattagttctatcaacgcaaacaacccgaacgaattcattaatgctatcactggcggtgtgagtaaattgtttagttacaccgtcgataaggcgattatgtcgctgaacaaaacaggatttagcaaaatcatcggggcaattagcccccgtttgattacttccctgtttggtgatagcatgtatggacaactgctatctgaattccgtgatgaaatgatgtataatatgggtttaagcattatgggagttaacctccctggtaaatccattgggtacgaatacgtttataatggtggcgtacctcaaatcagattcactcgccctgagaatggggaattgtcattgacgttccgcaccgattcagaagcccgtaacctgaaaatctttaacgaatggatttccgctattcgcgatgatgtaacaggacaatacgccttcattgatgaagtgacaagtactattcaggttaacttacacgatcgtgatggttcaccgcatacaacatacgtatttcagaagtgcttgcccgtcaaaatcagtaacagtgaattgagctatgagaacaacaacgaaatctggacatttactgttgattttgcctataaaacatcatgggttgttgaggctgataaagaaggctgggaagggttcaaacaatccgtagaggaaggtttagccattgcagcacgtaccgcaattacaggacaataaaggggctacggccccttttgaggatcttatgtttgatattattcgagtaacattaccatcagggatcaaacgattccctatgtttacagttaaagaccagtttaaattaatgctgacccgtattgatatggaaggtcggccccttaaagagcaacaggaaatactggatgaagtgctggatctgctttatcctgggtattccaaaacagaacaggaatacattttcagccgggtgtattgtggttcgttcggtaaaaacgttatcaaggttgtgataggcggtaaaggtgggggccactccgaagccttcatggtgattaatgatattcaactggaaaacgaatacaagctgaatgatgaaatcacattagggtttaacttcccccgtacacgcaatacaagcgaagagttgtttcttgaatgtatcagttatgtaatatacaacgaacagcgctatgaatggacatcactaaccgaagaaacgaaagagaatattcttgatatagtcgaacttgatgatgtcgaaaaaatagttactatgctaacgaaatcggttgatgtgtctatgcgcggtaaatcatttagtggtatgttaaccctgttcaagatcctgtttagtcgcggggatctggatgaatttgtgaagaccaactatctgctaaataaaaacggcctgaacctggaacctatcatgaatagtagcccaatggaaaggcaaatttatactgcattgcttgcagaagacttgaaaaaacaaggtgctgttaaatgagaaagcatgaatataaacacgttgagaaatataatgttgattatcgtcctctgacacatacagagtttacccccgacgcagattttatcaaaggggatgtttacctgtatcaaagagaatatcttttcattctggcacttctggaaagtaaaaatattgatacccgtcaactgttcatcaactgtgaagaatgtcaggaaagaatagaattccagcttaaacgcaatcaaatcatggttgaagatttcgacgataagctatacggcaatgacggaatcgcgctatctgttcaccctcgtaagactggtgatgaagagatccccgatcttatcgattacgtaatgatagacggcgaacagatcatgtggagtgattgtagcgacaaagataaagaaatggtgttggatgcaatcgactatgcaacctataaatcgatttctaccgccctggataagccagcagtggtcgcaaacatcccggtaaggtgttcgtgtgggcatagccatatcgtctctctgagaggcttacagcaatttttaaaggtggtctaaatgggtgtaaatctaaggttgctatatagcgatatagaacctaacatgcaacgagattggaataatgacgtatcggcctcaaaaggggccgcagcagtgagaaatagtttgattggtatcgtaaccacgatcaagggtacacgtccatttgatagtaactttggttgtgctattagtgatatgctgtttgagaacatgaaccctctgacagcggaatcaattagaacttctatcgtatctgcgatccggacatatgagcctagagtatataatctttctgttgaagttattccacagtatgatgataactcagtaacagtaaccatctattacagcatcattgatgacccggatgacgtagagcaaatcaaactacagctttccgcatcataacaaaaagccccttcctttcggttggggctttctcttagaattcaatgaatcccattagtgtttgatatcgcaattcaaacggggagatataactttgcatctggttttgatcggatacgatgtaataatacacctcatcattatcatcatatagcgcttctttgatgatgcaatatcgatcggtttccacgttcacataaagagtatccatgtactttgtaactttggaaccctgtgaactgatttcacgaatagcgttatctatgaacagtgacaatgcttgcatgaagttatcaaactcaccatattcacagcccataatagaaattgcagtgtattggtgccagcctttgattgtatctccacggcggatccatccgatttgtctacccccgatagatacacaccacactttaccaatagggctatagaaccgcacaacttcttttaataacagggacatgaccccgcattttgtataaggattcattttaacctcatttcatatcaagtagccatgaagggctagtttcaagagaaatcgcagtatattcgtattttacagtataacctttgaaaccgaaaggaataattgcattttcattgagatattttactttatgctttgcttcttcttcattcagagcagcacagactgttgtttgttcaacgttaccagcaggagaagtaaatttttcaatgatgatatatacgcagttcatcctattgtcctctttccattttttcaagtttcatcgtatccacttgcagttgaagtttaagaatacaacctttcgatatgttatacaagtagtcactaacgatttttgactttacctgatcgtaatcagaagataacgtaatccaatcatacatcgtttggtatgatggaagatacgtacattgttcttcttttgataacgctttaaatgattggtaatcggttggaggttccgaagcaattgcggttgtggtcataagactaagtgcaagtagtagatatttcataatgtattcctcattgttttcgatagaaccaatatagcaaaaagccccgaccgaagtcaagggctttttcatcaatgcaagaaagatttcacgtactgttcgatcttttcacgacatgtatcaactgaggtgctttccgcaattacggcatgacataacgcctcgcctccgacccagaaactcatcatgtactgaatatcacgaccttccatttctttttgatgcgctttgattcgatcgaaagcgttttcgattgtttcagtagcagtaagcatttcggattccccgtcaacctccgccagttccccatcgatcatttcgctttcgacttcttcccagtatactatcgttatcatgcattaccccagtggttaaccgtcgtaatccccgccacaattcacatcgccttcaatgaacagttcgcggttatcacgtaataaattatactttctttcgagttcaggcccgaacgcgtcggcgtcttcataccagctataattgtatcttccgcattcatcatcatattctggttcatcgccgcgttcattgaagtgaacaattttgatatcgtccatccccagttctttcaacttatcccagatatacgaaatctcaacgctatgggaaccgaacgcttccagtgagatcgtaccgttgctatcgacttgaggaataccccacttcgaacgagtatcatcggtgatcatatctattaatgactcaatattattctcaccgtagatatcagcaacttccttttctttaccaggacgaacaagaccgatcccgataataaagctactgcttgagctattgctcacaaacccagaacgaattttcatcgcatcaccatattaccaatcatgaatagagggattagcgcaaagacgataccccatagaatgaccttatcttcacgacggtcacacccatgatagataacacctccagcgaaaatcaatacaacaactgaaacgaacgcgaataaagaaatcatttgcgggtatccattctcatagaaacttctttcaggatcttattcagatcgtgaagcgcatcttttacgttaccttcgttataggtaagcatatcctggtacagccctttcaaacaacgattgataacatatgctttttcagaaggtaacattgtcccagaacgattataatctctgaaaatgtccatcatcgtgccgttgttgccaggtaatgacggattgaagttaaccataccagacatcaaactatcaacatacacaacagttgtgttatcagaacgatacgcgccaccaactttaaaccagttgctgaacacatacggagattcccgcacttcgctcaaatcggttccgatttcatcgatgtttacacgaatgttgttaaaatacaccgattcatcaatagaaccaggacgccatacgatagcaccgttgttatttttgaatccgactacatcaacctgccagccgttatctgttaaccggacatcatcaacgacgatgaaatcaggtagctgtgaatgaaagccgatgttttcaggacgggaattacgaaacccatcacgattggagaaataaaggatgtcaccttgattcagtttgcatatattcataagatttttaaagtccaattcaagtaattccacaagtcacctcaaagccccctttcgggggcgagatctcattagagtttaacttctttttcttccagaacgattgtgcaatcaaatttcacatctttccagaattccgctgcaacgatatctgttgcggtaacgcttacgctggtttcttcaaaatccagatccgcaaaccatgcgtgtccgacgacaataccgtacattacacgactcaggcgattattaagggcgcgaacctctttaatagtttcctttgtctgcttatcaagatactcgatcaggtcattcttgtcaagcgcttcgatctctttagatacagtatcataagcccacagaatgatcaggtcgccattgttgagtttcttcttaccttcggcgcgttttgcaacggtagcagcaacagccggaagtgatgaaacgcctttgattttcacgttcagttctttcgacatgtaaacatcagtcgattctgtgcgctcaaccttcggagaaaagccgtaatcacggatcccttgctcagacaaccattcaccagccgcctcaccaaagcgctgtttaagcccttctgcgttgcgtaaaccaatcgcgttatcacggaagaacttcattaccttctgacggcctttcaggatttccagacggacgttatcagcaacaaattccttaccagaaataccgcgagtcatcgaacggttaaccagaggcagagaggtaaagtcaaccagtacagacatacggtcttcaccaattttagccagcggtttgatagtcagaccagaagcacgtaagtttttcagagtcgggatatcggtttccagcggaagtaccttaacgttaacgataccatctttaacaatggtaaagttacgcacttgtttggtttctactttttccggcaatccaaactctttttgtttgctttccggaatggttacgtaaccttgtagatccgtattgatagaaatgttcggacgggaactgttaccaaccaggtgtttcactgcaactttcgttgtggtttgggtaaattccggtttccatacttcatgcgctaccagttgcgccgccagtgctttacgttcttccggagtagaagcgtttgcaatctgttctgacagtttatccagtgtatcatcatctttctggacagtctgacggcctgtacgattgtacgcccagtgttcagaagacaggtcgatcactgtgtcggtttctgccagcagttcgagagcatcaaccagagtaaacgcgttttcatcaggaaccatgttgtaatcaacaccatccatcagacgtttagccggatcaacaactgcttcggagatcatatctttagcgtttgaataatcctgtttggtaaagcagttatcgtatgctttaatcagacgcacatcacccagctttttcagaactttccatgccagatctggattcatggtatgaagcgcatgatacagaaccacatacagaacctgttcaccttctgctgttgccggatcgaagccgtcaacgtcattgatcgcgttttcacccagcgcccaaatgtttttgatatgttccggaaccagaacaacaccatttgcagcattcaggacatacacacggccttcatccaggtagatcgcatgagttgcatcgccaactttgacttcaacacgtgcggaggtttgcgcggtaatgatttcatcaaatgcaggtacatacgcatcaaacccttcaacgaatttgtgtaatgcgttggttgcttccgccattttttccagcagaggacggtttacataataaccatattccaggaaagcaatgttgttaaacgtcaacggcagagtagaacacgctttcaggatgtcatcagtacgccagcagttatcataaccatcagtcaggaagatcagactgttcagattgccattatccgcttgcagatcggtagcgacttcaaccgccagttgcagaggttcaacgaagccagtacatccggtcggacgcagataacgatcgatagcatcattgattttgctcaggtcggatacagagctaaccttttcgcccacgaatacagaaccgaactgaccacggctggagaaatacagaatagatacggtatcatcctgcttaaccagcgttgccaggttgtttttcaggtgctgacgaatgcgcgggagttcgttatacatcgatccggatacgtcacaaacaaaaacgtggttagtcggggttggtttggctacggcgtttttgaattcaatgttagtgatcataattttctcatttataggtaaatttgattaaaatttcatttacttttttgctaatagtatctaatgcatcatcgcatccaaacttactactcaacaatgaaacaaaatcatccatcgttgttgtttgagactcgccaacgtcaaaagacaaagcgtaggcaacaggatttttaatccttacgatttgaatcgtatactcattcagatcgaaccgttcaagatattttcgcaaagaaaataaatcaatcggtactggtagagtttgactaaacgttatttcttcccccagttgataggggggcatttttacacagatttcgtattccatcagtgatgactcttcatagtgtgttccagattacggaaaatttgcccgtgttcaagctgtgattggaattctccgcattcatcagagtaagtaaattcataaatgaatacaccgttctgattgccaaatttagcgttgtactcttcatacaaccacatcttgatcagagcgtctttctcttctgtttccagataataccagtcacgcccatcataagcaagcgcaatttgaggattagaccgatatcgagtttctgcgctatcttcggtttcccattcataacgcttatcatcatagtatgattcgaaaccatcacccatatgaccacccaggtcgcggtgtacttgctgtacaacttcttccgctgtcgggcaagtcatccagctataaccacagttaggaacacaatcacccatcatttcgcggagattgttgatatcagtcggatccttcgggaaccgtacaataaagctacttgatgaactattgctcacaaaaccagaacggattttcatttgatttcctcaaattcaaaagcggtgaaatgttttctttcgtcatacccaacagtacaacgatgcgtttgctttccggtaaacccgtcaaacacagttacacaatagtaatgcaacgacggaagcggtgtatgtttaatgtatttgatcgcgacgttcaggtcaacagtagaacatacacaatcagacgtttgctcaaaacggtcatcaaaaatcaactcaatgctatagatgttcatctttcacttccttcatgtttttcataacctcttcaaaagttacggggatttcgttgtactgtagtgattcatcatcccatacatcgcgatgcccgaatgttgaactttttgcaatgattttttcattttcccatacatcaatagtaacatgatcaccaagataagggaaattaggaactttgttcagcgcatcaacgcagttttgcaatgattcagaaacatgggcaatttcagtgaattcataatcagcactataagaagctacgtaaatcatcaccaccccctaacgatgctaaccagcagtaaacccaggatccagaacacagcaaccgcacaaatacgggccattactacatttccgcgactagtccactccgcactaagaaacaagaggacaaaagttaacgcgtataaaaccatttcaataacttcggtaatcatataaacctcacgaaaaagcccctttcggggcttgtttaattaatgcccgaacacaccacgaatagactctgcgaatgcatacagttcaggatttttagctttcactgtttcgatttgctccagaatgtaatctggtttatatttcgcaccgaaccagcagtaagagaaagagcgatcccacatgaacacgttatagtattcaccgttgcgaacttcaaccatcacataaccaggattagaacccagcggataatctttcagaagattgaatttcgcgccagcaccagtacatccgttaaacaggtcattaaaagtcatggtatgttccttttgtcagtttcgtttcaacaaggtcactatactattctttgttatcctatgcaagcgcttttttgatttgtcttgcaattgcttcgatcaccggaacagatacagagttacccgcttgtttgtacgcctgtgttttgctcttatgcatcttgaatgaatccggaaatccttgcaaccggaaacactcgcgaggtgataacattcgagggttcttaccttcctgcaataccagacattgaacaccatccttatagtattgggctgttatcgtcccagtacacacagaatcaactgtaacggcctgatagccaaaccccttgccgtttgccttgtttcgttctttacgctctctaaagcccttccaggcacgatctgatatggtgtattgatcattatccggttcgagaatgtcaccgacccttgttggggtacgtggaggaacaggaaagctaaagaacaccggatcgcgaaagcagacaataaacacacgctctcttcgttgaggcaatccaaaatcttttgtattcattacctgataatggatatcgtatccttcgtcctgtaacagcctgtagatggttttaaacgtgttgcccttgtcatgggttaatagctggggaacattctcaaagaacagcacagagggctttttagcccgtataatgcggagtatttcaaagatgatagtaccgcgaggatctaacatgccctgttttaaccctgctttactgaacgcctgacaaggaaaccccgccaacaggatatcgtgatcgggtacaccgttttcatcaatggtgaatatatcaccctgaatattttcatcaccccagttatcagcatatgtttgttgtgcatgtttatcgatttcagacgttaaaaggcattcgaccccgccgaatgccttatcgaaaccgagcctcacgccaccaacaccagcgcaaaggtcaattattttcatacgtcgaaatcaacctcatcgattttgtatgattcttcgccaatatcagcccatagctgaatattcacactttttgcatcacgataaagagattgaccacaaagcccacctgtataacaagtttctgtaatctcgttaacttccaggcggaggctattgcgcataattttaacaacagccttttccattgccgaatctagggttttagtatcacccaatactacatctttaacgttcaaaataacatcactcattatcgccactccgtttcaattccgtgtttgtatgcgtcaacgcccagaggggtgatcactaaacacatatcagtatttttcgttggtgaactaaacgccatagatgcataacctttttgaatcagggcatcacgccccgatttactgggaacatcgttgaaatctaaatccaacatttttgacgagtatctgtaaagtttacacagaacatcaatttcagcgccggataatttcgggtatgtcatttgtagtacctcacaacatgttcagaatacacacgttcaatgaaatcattccagaaatcgcgatccacttctttcggataaccagatacagccgccagcttttcaacttcacacatcgttgattctagcgcctcttgtacggttgcgaaaggaacaccgccagctttaaccattttcaaaaatgcgctatccggaagaggatacacaatatcaccttctttgaaaatctggatcaattgcataccaccgcgcaatgcatgagaaagagctttccagtcgatcccgttgttggcttctgcttgccgtgcgcgttccccgtattcatcccagagtttatacacggatttcttcatttccgctacggtgattgtagactggaatttacgccccagaacttcataaaattcctgacaacctgatttcagtgttttgtctgtaacgaatcgacaaaactcgttggtcgggaatcggttagaaacctcaccaactttgatgcgcttgccgtagttagattcatctacgttacccagcaatgatgtgccataccagtaatcaggaatcatctgcaacacatcgacaacttcacgtaatgcagccaggcgagaacctttaacgccatacttcgccgcttgcttacgaacataaccaaacaggccagttagttccgtagtgtagaagcgtgaacggttagcgcggagatattgccagatatcagagttagcgatcagtttgctatcatctgcatgaagcatatcaatcgccacggtgtcaccatcacatgcgaggctgataaacttttgcagactgtaaatctgacggtctacgtcattaacaccgttctttgagtttttatcgccagttgatgtatcaatagacttcttcgcagtacctaacaggatttcgcgaggatgagggagataaatccctttgtagtctttatcgcttgttggtgtttccagtccgtacaggtgagaaccaaatacggtttccataatcattttcatcagaattcaacctttaatgtttttgcgatcccgcgcaattcagcggtagtaatatcagggatgtttgttccgtagctgttcccaaatacttttttaatcttatcacacaaatcgcggcggtacaccatttctttatattcttcttcgctacgatacagttgataacccatccacccctcagcccatccggaattgcgcttgattttaatattagtacaacaatcagacccatcttccggtcggaaagatgcatacaggtactgacgcgcaactttttgtacgtaaagggttttggggttgcgattttgtcgctggtcactgcggatcccagcatcatacaacgtatcaccaactttcacatcacttaaatcaatcatttacgtctccagcaattagttttttcacagtaatgaacgggaacaggcacacccaacgtttctttactgcttctgttgtatgttatcacaacgaatcggttttcgccacccctaacacactccagatccaaaatctcgcgggttcccttcgtgttaatgtctgcaacataatattcttcgttgttgacaatcactatatccgacataatcaagcgaggtttcatgcagcgtacacctctgattcatcgatccattccagatcctgattgagtgattcaatcagctttttatcgcgtctggaaataacaacggtagaccctttttctgccttcacgatgatatcaccagaagaggtaatatattcaactacataatcacggcgagggcttccgagtttatcaccaactttaacagcacgtctaaccgattcatgagatttttcggtgaacactaattcatcacctacgtgggtaacaataccatcaacagcagaacgagaattaacataaattttgctaatctccgccatgaaaacactatctctcagatatcgagcagccactttatctaaacactgagaagatactttatctccgccaggatatactgagataatcattacatgaccctgaacacgggcggttcctactttatgcagaatgtaaaccattgaaccatcagaatctttagatacaaggatcacgctgaaagattctttgtgttgcttctgagtttctccacaggtaaaactcacgtccagaaaatcaccaactttaacagcacggggttttgctacttgttcacgagcactaataacagggatcataatcatttcctcacagtttcaaattcttcatcagatttccagtacacgttaaaattacgacaatcatgatcggatgtcaacgtgtatttttcatttgttttttcgtcagtgataaccatagtttcattctcgatcgagttaacaccgtaaacgaaaacattctcaccacgtttgtttaaaaacgcatcacccttttcaatcaactgccaacaggtaacaggcaaaccacccggactaaccgggcggctaacaagacaatagggatgtttaatcatttaaattcttccattgcataggaagtaagatctttgaaataccttgcggtgttgccttctgggttgtttgtaatctccatcaggataacagcactatcaactcctgctttcttagccatgaatgaaagggcttcggtagcaataatcgttgctttcataacatcagctttagaaacgttgattgtattcatttttcttccttttcattaatcacttggtatgtgtgtataatacaaaagccctcacgagaacgcaagggctttttattaaatttcgtataaatctggattcacaataaccgcacataaaagatcatctatatgtgcggcttcttgttctaaggtttgcttagatgaatgtgctttcaagcaacccccgtaaaggcgtttactatctggaaatgatcatcgaagaattccccttgtcgttgcacgacctcatgcataggtagccagaacgcgtctgctgcatcatcagcaccgcccatgatacgaggcaatgaaccatcgttattaggttcgagcttgatatactgtgctacagtcggttttgagaagtacaccgaacgtttcggatgatcgaacagcatcgaattacggatagaaccacgaataaccttttctggtactttaattcgtacttcttccagcaattcacggatcgcacaatcaaggaacgtttcgttaccgtttttgtgtccacccggaagcgctaacgcatctttaccaggcgcaaacttacgacggattactaacacgtggttattacatacgaccactgaatcagccgtgcaacagttcagagaatccggatacggatattttttgaacttgtcaatctctcgttgccagtgcgcatcttcatgggacaaacgctggaattcttttgtttgtgtccattcatcgataaaggaaaccgtagtgctaggcgcatattttaacaaatcttcgtcccagccttcatggtgttcccagataattttgcgtaaattggtcgaggatagatcctgatctccaaccttcacaggttcaaccggaatattattccatccgaatgctttaagccagtaagaatctttgtctttttcgtacccgacgatcgcaattcgatcatttcgagtttcatcgattgccatacgaacacgggatttccatttttcctcgttatagagataatccggaatgtgagcgaatttgattctggctgcatcttcaacatcaagtttgcagatagaccagcgagtgatcattgcttgacgctgtttagcggtcaatgggtttaatgtgttcggatatgcataagcagaaccgatcagaatgtaaaccgtatcagcaacagcaagggcttcccttaccattttctcatgaccatagtgaaaaggttgaaaacgtccaattactacagctttatcatatttgtgtttcataacgtgctccacgtttaaaggttaatcataaaacagacgcaattatcaacacaccaaacaatccaccaatgaaaccaaagaatagtgaaatgagtatagtcagtacgatctgttttatgttcattatagtattctcgttttagatgtcaagcccccaaagagggggctttaaaacattatttacgagaatcgaaaatcactttacccgcataatccgaacccattacagtttgaggtacgccacctttatagcgggtagagtagttcatctgtacatccagttctttccagcggatcatttccggtgtaatggtgcgttgcagggcggcgttggcttctgcttctttcttcgctgcatacagacgggcatcagcatcacgttcgttagcgattgcagcgttttcacgcgcctggcgatcggcttccgcttgttttactgcttgtaatgaagtctgttctactttttgcagttcagctttagcagcgttaacctgttcttcgcggatcttcgtgttagttacctgttccatgataacttccggcagggtgatatcctgcaagaatacctgtttcacagtgtaaccgtaaggccgtgcataatcttctacttcctgctgaatcgcaatttgcagttggttttggatcttcgcatcaaacaggtcttgcgcttttggtacggatttaccaaattcgcgaacagtggaaagtagtttttcagttacatacttatccagtgcctgatcctgattacccgcgttgatacggttgatcggtgctttgctaccgtcgaattgcagcattacggtcatatccacagtggatttaaatttatcctgggacggaacctgtaatttgtcgaacttcatcgcgatgtctttggtgctgaacgtatcaaacgttgccagcgggtttacaatgtggaaaccaggcagtacgggtttcggtgatactttacccatgaaggtttcagttttaaccgtaccgtcttgcacaatggtatacatgttaggcactaaccacagtgctgcgactacgcccagagcgaccagagaggttttcttcgggttgttcacgatagtgtttaagttcatcataatttccataagttgttgttcaattcgatagttattctatcatcacatttcacgctgtcaaactattttaagaaagttttgtcagcttgtagattgtttgatagcacaagcccttaatctcgtccaggatgttcttcaaagaactatctactgattcgtagatctcgtttgcttcgttggctattttacggagatacgccaccgtgtcaagcacattttcggtttttagcacaggtttgtatcttcccgtgattcctatgtggatttcggtgaatttatcaaccaaatcctgcatatcttcgtaaaaaccctcatatgctttatgttgtgagtatgaacctgttgcaaaatgtgcgctatgcatataggtaacggacataaggcacatgccaataaaggcatctatcttgcttgagttctcagattctgtaatttgtttaaatgattgcatgatgatccctttatgaacgatggatacttgcaaactcatacgcgaccctaatccctagctttgcgcattcggattcagatcggcattgtttttggcgccattttcgttccatgtagttgtagaatagttcgcttgtatttacgctgggagggatcgttgtgatgtatacttgaagggccgcattgatataatcgtcaaattctttctgaaccggacggtcggcggcgtgtgttgtgggtgtcatcatcaacaatccaaacaacacagccattgatatgcgtttaatgttcataacaattactcttttactcatagacccactataggtctactcctgtatatatttatagcaaaaacgaggccgaagcctcgttataatatttttgttgtaaagtcaatcaagtaatgtcataccaacacaaacttctttcgaaagcgcgtattttgttcacgttttctacgttttcatcccaaccgatcacaccagctttcatacgtttcagttcctgacgtaaacgggtacgtacttttgaatcaattttctttactgcaatagaaagcattgcgttcagatcgccatgagctttgttaccgtcgcgacacaaattattatcaaatcgaatgtatgcacatcctgatttgtgtttccagttggttgagtaccaacgtaacccatccggatcaataccatgttgagcataataacgagaatactcttttacttcttcgatcttttcgttagatgaacggtcacgaagaggattgtatttcttacggtaagtgcgactcataatgatctccttttgtttatgcttccactgtatcagggttgttctttagttgcaagtaatgttttcgacaaagtgaaacatatttgtcttcggccccgatctcaatctggtcgccgttagcaacaaatttgccatttgcatcaatacgggcaacggtagttgctttctttccacaatgacaaaccccccgcaactccctgatctcatcagcaagcgccagcaacatataagaaccttcaaacaagttcaactgaaaatcggttcttaatccatatgtcattacgggtatatctaattcgtcaactacccgacacagatccatgacatttttcctggaaaggaattgcgcttcatccacaaacacgcaagaaaccagtttctcgctatcactgtaaaaatgattgttgtgaacatcataatacaagtccatatcaggcgtgatcatggtgcatgttgcttccaacccaatacgcgaagagatactctgtttaccttctcgcgtatcaattgctggtttgtacatcaggatccgcataccgcgttcctggtagttgtatgcatcagtgagtaaacgagcactcttgccagcattcattgatgcataatgaaaatatagtttagccatttatcctctcaacaaaatctggggtattttggaatttcccttccccttcatggtttttgcatgttttatttgaacagtagatccaccaatcccactcatcataagggggtttggtaatgttcattacacaaattaaagggaaatgacaatcccgacagcgaacattttctataatgtttgcgttagccatgcgtataaccgcccatttcgctatcttgtgcttgatggatatcaagataccacatattgattttgcttttcagttcgcccatttctttatcaagcccattatcaacaagacagagaatgtcaaccaccgttttacgctgggtgatgttgattttgtttgctttcatcgcttgcgccaatgcattacaggttttaaccagtgcggcgcgttgccctttgattacggcgatccgtttgttcgctttcttaatctcacgccctgctttgataggatccatcatgattaattcgccttacgtggatcgaaatgaacgacgatgatcgggtaatcgccagtcacctcattaataatgcgcttaatgagttcccagtcgcccccagcgaggccagcaccgattaaaggtgtgatgataggctttccagtcttaacggcgtcagcaagccctacagcctgtttaaacgcattaccgattgcatcataatcgacacgcggcccaggtgtccagaaatcatattgagtatatgcattgaaaacaatgttgcctttttcgccaatgtaaacagaacaagttccgagcttatcacgggaaccttttaacgtgttggcatcaacttgaaatgcaccaggaatacgatcgcggatctcgcgagcaataccagcacccatattgcaataacagttgcatccgtggatcaaatggccttcaccgttcagatacatgttgacagcattacctttcacttctttaatgatcatttttatttttccgatatagtagggccacaacaaggcccatcaaaatcacaaggatccacaatacagtgaattgaacccctacgctcattttctcgctttccgttcacggcggcgatcttcttgatgacacatatataaaacaccaccaaaaattataaaaccgataacaacgcctataaagtatccagcactaaacatagtcatcatccccgcaatagtaacaaggcccagtgctctcatgcttaccagcattgtacgccaagaacaccacaaccgccgccataataataaaaatccagatagccattagtaaagtcctatgccagcattgaattcgtcaaccaaataagtacggaacttttcgcaccgttccttatttggcgcttgtttgcatagattcatcattggttcagactgcaaaaactctttttgtttcagcaacttgccgcgtttatacaggtgagcattttcctctccccacatataagcaacatctaactgttctgcgatcacctgcttacatactgcgacatctttgatatcacgattgttgcataactcatccaggcgagcatcacccgcgtgagcaaatccagcaaccagagttaaaagcagtgctaactttttcatggtgattccttattcatcctcttcgataggggtataataatgagcattgcagatatacgcaagaacttttttcagagacatatccgagaatgtcggatcctgatttcgtctcatcccactaccagtttcaacagcccaacgtttgttagctggattgtatgtcagccagtaacaatcccattcagacagagtatgttcgaacagatcgaaacgcttacgcccatttgcttgcggcctgacaaaaggttcaaccatttctaaagcggttaaaactcgattaaggtttgaaccgtcttcatccatcgcgatccgcaaacagtattggttaatgtccggatccataccatcgatacccagaccgatagattcgaaaaattttgttgccgcgtgataagacacactggaagaacgatattccaacatcacggggatcttttccccgtccttgacgttgttaatgatatcctgatcgataagttcaatcaggtctcttttttccttgatcaaggtagaaatttcttcttgcaacggggctatcttcgcatgaagttcttttatccgttgatcaattacggacacttcgaaagctaaatttctcattgcacccattccccgtttttgtcgatgtacatgatccaatcagcaaccgcccaatgggaagtattgcctttcggagtcgccacgatgtaggaaccagctttaaacagtacgcgtttagtttcgttcaggatcaggtcgctcataatgtattcctcatttaaccaaagtgaatcgtgattcataagcatcgttcgggcgctcatacacagtatccgaacttgtaatgacagtgtacacggtttctttcacaagatccatgattttctgtgattctccccagacattgatactaaaatacatcccatttttaggaataggattgtattccatatcataatacatatccatgagttcacaaatgaacaggcggcgctgttcgttatcatatgtgaaataaatgttaaaacaatcgagagatttactcaaagtaatctctttgataacgatgttgtcttgtttgctaaaatgttcgcggattgcttgcacacaacgcaacaggttagggtaatcatatttttgtgaaacaatgacttgatgtgaaacgctcataatgtattcctctcaattagatgcatccataataaaaaagccccagaccgaagtcaagggctttttgtcaaatgatttgtttttcttctaacagcttcgcggttgtattaaccatacgagcataatcacgggcttctttctttgtatacttgaaaccagcgttatagctcgcaagcgcctttttcaagtcgcctttgtggtaatcaagccagtactccagttcatagatcgcatacttcgatccaccttgaagagtttcgagctttttgattactacgcgtttaggatatgacttatccattcgtgcgctggcgctacttgcggtaacttgccagcatccataagcgtgatggccttttttacctttaccgacattctcacatgcgcgagactcgatccagacaatagccgctaaatgataacctaaacgtttagccttatctttttctacaggttttgcagtcttcaaatcatagttgtgtccaactcgataagcatactccagaacctctttctgcttcggtgtgatattatccaaatccttgatgtaggatggagaatttttgtttgccggaggcttcacagtagccttttgtaaaggcaattgatgagtaggcaaatccgcaatgaaatcccctagcggatccgtcgcagcgttgccagaaaaagagcacaagaaaatgctggcagcaataataattttcttcattttaatacctatgttgcaaaaagagtggcaataatacaccccactttatatttatgcaactattttagatagttttcgcgtcacgtagtttatcagcgataaactcagcaatgttataatttgaaatagccttgttaggatcgtatagtgcaatgatttcatctaacgataccataacggcatgtttaaagtagacgctccagctagtagtaaggatctcactgttgtcaaatccacaatcagggctgaacaatgcgcggtatttgtacccactgtatttcgtcagccgattcgtgctgtgcgcatcactggtgatcagaaaagtcccctggtgagtttcaacaacgaaaaagtatccgaggcgttctttgttgtccagcatcttttcaaacttgcgatcggtttcttcgcgaacaatacgagaagtcagcatttccaacactttatcgtattcgggccaatcattctcgatcacgattgcatcaaacggtttcttaccattaatcccgcgcccgatttcgattttcgtgcaaatttcgttgaacgttttcaaatcttctggcgtcagttctttaagatcgctcaattttgctacataataacgtttttctagtttcatttatggaaacctcaattcaaaaataatttcacagagttaccacatttgggacatgtgataaattttttcacgacataatcagcagcagagaaaaatccattgtaaattgattctctcttttgctgtacatcagatagttcatactctaacccacttttacaacaattgcaaacggtgattagtttttggctatggatgacagtaatcatatacacctcacaaaaaagggggctttcgcccccatcattagaaattgtcttcgacaaacgccgcgagacgggaacgatacactgtatcaagaatgatatggcttgagtgttcgtattctttcagcttttcaacagcccatacaaacccgttgttaacggcagtgtttcgagggttgtcgatctgcttaatgttcccgcatagtatcagaagtgtgttctctccgcaacgagaaatgatagatttaatttcgtggttgctaaggttttgacattcatcaacaatcagcacagaacctttgcccggatccggatgtccgatactgcgaccacggaagtaatacaggctagggaattgcaccacccctttttcaatcaaaccttcaatgtatttttcagattccggattatccttaaacagaatgttcaggctagtaatacaaggttcgatagaaggccggagtttttcacccaatgtaccaggaagaaagccaatttcacttgataacgggctatctgacttcacatacatcaagttagcgtaatgtccactattaaccaggtgcatagcaccggaaacagcaagcattgttttaccagaaccagcgccgcccataatggtagcaacatcgatttcattgctcataatggattcgacaaaagccgcttgcagagaatcacggggctggatagctttcatgagtttgcgtttcatagcctgttcgtgcttaacaggtaagacattcaagcaaatctcatcagcagtcaccacacgcccgactaactcaccatttgaggtaatgtactggttaggataaaaatcttcgtcaggaagcgaactgtaagtgatttgggctacattatccgtatatcccaacacttccacggtatcccagaaatcaggaatctctacgtaaccggaatacaatacatcgctatcttttaacgtatcgtcgccagtatactgttctaccttacacccacgggacattgcgatcagcaacatcataatatcgcgagtaactaaggttgcatcctgttgcatacaagtttcaatgattcgttcgtcttgcttgtcaagagcaaacgttttgtttccgacataatcaaccactttaagggtgatagtgtcagacagtgctgggtttgtcaggtttaaaggaatacctgatttcgtaatcgcatcatatgactgaccgaaaataacttttgacagaagccggatcgccaatcgtgcttcgtgcgctgttcgttctttcgttttcaggtgatctaattcacccatagtagcagaggtaataatgatttctgtaccaggttgagtgaatgaatagattgaataggggttactaatcaaaacattggtgtctaatacgtattttgacatacattaaccttatgtggtttcgttaaaaaatgcaccgaaaacctcttttgctttccggttataaacggattttgcttcttctggagtgttatagtaccccaaaaattttctttttccatctatgtttatctgcgctttgtacttcccattggctttatgataagaaacacctttcaaccctgtactactgtttgagttacatttctttttcatcgcattttgctggttcgtcgctttctgtaaatttcttgctgtatctccattctcaacaccatatacatgatctacgataggaggaagataaccattctcaacgtaaaacactattcggtgtcgcaaatacatagaacctttaaaatgaatttgggaatactcgttttttgcttccggcttcacttccaggagacatagggccgcgctgaactttccaatacactttacctgtagatgtatcaacatctacaaaattcagaagagattcgatcccttgaatctcttcatgtatggttcttgatgaatagccatgacttttcattacatacccagcgaaattacgtgaatatatgctaatgggtgtctcttttgtacacaatgcatgagtgtattatacacaatgtccatgcgttcattgcgcgtaagatcacactcatcaaaaataaggtttattgcctggtgctctattcgacgtccacggaaatgattaagaattgcccctttactggtcaatacatcacatccggtagcaccatttagctgtttggcgtcttgtgctgcatttaacgtatgcgctacgtaaatgttaagggaactatgggaacgtttcataaaatcaaacgcgcctttagtcttttgcgtttctctgcccagatccagcctggtttcgaataccataaaatcgttagggccgtaattatgcgttggttcttccaactctcgcataagatgcatcttacgacattcttcaattgtctttacataaaattcactattcatgttttacctttaaggggccaaagcccctttgttacgctaattccacatgcggggcatcaatgaattttgtttcgatcggaaggttcggatcatttttccagttgataccaaaacgcagtttaacacccagttcatcacctgcttgtttaacagcattcaggacaggcaaccacactttagggtttgtttgccagccttgaggcaacacgctaggatacagatccacagcatcacccgtgatgtgttttgagttcattgtttgagatacacccttacggacgttctcgcgctgttgttctacagtacgcagaccttcacgtacaccaaaatcaacaggagacagttgcagagcgcgttctacaactttcaccagttgaggtttaacacctttaaggttgttaaggcttttttgactgaatttaaacataaatcacctcttgtaaaaataccctgtttgggtacacagggtatttatggtttaagaggttcgataattaataatcgtaaagatcaccgaagcattcttcaaattcacgtttacgtttcatctgttcttcttttcgctctttcatatcaggaggaagacggtcttcattgacttcatcaatgtaagcctgtgcatcctcttttgttagaaagaatgcatggaagttatatccgttgcgcccattcatactacggtcttcaagagagaactctgtgtgacagtcccagtctttgtacagggtgatgcatttagcaaacagcccgataccgcgatgcatatacgggaagccagtaacaatcatcttgctacccatttccgccttttcgccatccacacaaaatacttcatacatgatcgcgcctggtttaacatctttcttaacagcacgtttttcaaaagcacttttcataatatattcctctcaattggtgtaactacagactactggtttattttctggatgtcaacaaggtttatcgttttttgacggaaagttagagtgaacaaacgatcgtgaaggttgtctatccgttcacaagcctgtttcagtatggttttatcaccatcatttgttgtttcaatgcatccaagttcatcggcgtcaatgttcactacatcgctcatcaatgaagcaaacacgttagcatcaggatgtaacagttcttcgatttcggccttcatgccgtcgtgttcagaaaggatatcaataatatcgcgggttaaatctccctggtacgggaaccctgtttctaaatgattaatgatcctttgtgctttcgtaatcataattttacctacaaaaaagcccctttcggggctagttaattaaagttcacagcaacggcacacaccgtattttgtaaatggagcatcaccgctaacgtaggcccagaaatcacatgcttcttcggcagtatcgaagattgcagcatcatagaacccgtgggcttcgttaccgttctcatcgatgaaaaccggagtccagatattaggattgaagcaatcgtcaacaacaacccaaccttctttagctttcattgcttctttgttggcttcgatgtgagctaagatttcgttcatgatgtccatttttctctcctaaagtgcgtttcgtttcgacagggctatagtctcataaccccgtatctacgtcaacacttatttgaagcgaattgtgctatttttgaaaaatagtccagagcacacagcaccttcaattttcacccctgtagggcttttagcaacgaaccctgttgcgtaggtgtctttctcatcacatgcaaaccaggcatggcctgtgtacgtgatatcggtaaacccgttagcagtcagaatacgttcggcttctttctcatcggtgcatccggattgtgctaaaacgacaatgacgactaacaccaaagcaataatatatttcatgttaaactctttttaagttggttttactggcttcaatccagtacacgggatcagaatagttaccgcacatacccagtaacacagttgtacatcctaaatgatcggaaggtctcaatccatcaggatgaaaaggcaattcgttaacaccgatactggtagcaaaaagagcacctccagtactgtaaaatgttttgatatgatcgtatgcatcatcaggccactgaaaacgataagttttattgtcaatggttactgtatacatatcatattccgtaaacaacggatcttttccttgtgttgccccatacagagcgccgcgccattcaaccagatttgcttcaatgtcgcttacacaaatttcgttacccatacgcaaatcatgaaggatcccttcaatggtacgaatagccccactaagttcattagttaacatagagtttcctttaaatcggtttaatggttttcaggtgtagtttagcataaaaagaaccaaatgagttaccattatgatcaaatttatagttttcactcttccagtatttccccgatttcatcaggggaacacgcttcttacctgctgttatcgtttcaaccattccggtatgagtaaatgtcatgatataccctcttctttcagcacttcccagatcagtttatcaaggtgcatcaggttccacataaccgaatcataagaacccagtgagcgggagtaaatcactccccatgaacgataacttttctggaatgcttctgcactatctacatcatacggcatatcatcaccggatgcaatcaaaagtttaaggatcatcagactgttcagaagttttgaactagcgtcttgtgcttgtacttttgcacaataattttcaataatcgcttttgcctttggttcggtgatgcgtccatttttgcatcgctctttgtacacatacataagttcatcgattatttcttgcatataacgcctcccgttctactgctgataacccgcgaatgtagttctgtgattctctatgcgcatctgctacagcgcgtcctgctcgttccgacgccagtatataagtaacaacttcattacgaatgtgccataggtaatccatcattacaagatcttcttctgtatgaaaacctttaatgtcacactcgcagcaaatagcgtctctttccgatagtgccagttgcgcggattgcgcgttgattggcatcatactgtacttgtcgatcaaactatccaacgttcgcggtttcacaataccaactgttacaggaacaggacgaagagtaggtttatccgaataaatcatagtattcctcttcatcaagtctagatgtcagtttagcgataaagtcgaaaatgtgttgtgaaccatcttcaacataatgacggtatgcaagcaaagttgatacgtgacacatatcgaccgattcaactttgatgcttgatgcgatcattgtatcatcatttccatatccgtcaatatcacggagtaccatttcttcagtcgggaaacgctgaaggagtgacgcttcccgatctgataccagagcaactaagcgattatgtcgcgtgttgtacgataatattttcatttcaattccaccgcgtaaacatcaggttcaggggctttgtgtacgcgcatatctttaccgcataccgcataagccggacagttacgacaaccgttatgatccttattaccgatcagttcattacggaactgtttggttttcggatgttcccagatatccttaatgaaatcgttcgcttccaggacattcaaaccttcttcccaaccaccttcaacccagcgttcggtaaacgaacaagggaagaactcgcctttctcgttaatgtacgagctaaacatagttgcttcgcaatcttcggcatattgcttgtactgttcgaagtttgggtgtccttccatcgcttcaacaaaagcaggggctgaacagctatcgaaaccaaatcctacaccagaatcgaggcaatattcaacaagttttttatattgttcgcgggtaactgtgtcccagttcttgcctcgtcccttttgtttcagacccaggaatacgatcgcgttaacttgtttcaagcgcggatcattctttacagcatcaaccacgttaaacgcgtcatcataggttttagagctaaccatgaaatgaaggttgatttgctgttgtccggcttctgcaagattagccactgaattaaacgctacatcgaatccagcatgtttgtatactgataccgcaacagccccagcaacagccgctaaacgcgctgcaacgtcttttgatacatcagcaatggtaaggtttggtacaatgcctttagaacgcgcataggccatcatatcaaacatatcagggtttgtttgtccctgtgcatcagcaccgagggcgcattgtgttaaccagggcattttatcaatgatagatttgaatgtatcaagatccatattgaagccgttagggttattggacttgtagcagaacccgcagagtttacccgctggcccgttgcatttggtagtgatctcgatatcgagaataaaaggaaaatgactataaataggatcgtcagcaggagtttttccccaagtcatcatatgacctgttttcatatcaaaattaaaattaacctcttcggaacgatagattttctttcctttcgcttccagtagaagtccaacaggcgttttgatatgtttggcgtttactttaacgtgtctcataggaacctcataatgtattacgtttacagaatcacaaacgttatagagaacaagcactattatggatcaagaaaacctaaaaagtcaatgcttgcttccgacgatttagggaaacactatttcagtagttcccgtgatagtcatttcatccaagatcagaaggaaaatccaggacactacaaatataaagtaatcgtatctgggttgtcaagggaaaaggcgatgaaacttgagaaaaggttacacgaaatctataaggtggacaagaacccacatttttataacaaacacatacacaacagtgttgatttttcatgtacaccagaaacaggaaagaagatttcgcaaacacaccagaaatatgcagcaaagaaaatttcagaatcacataaaaggcgattcaaggaaggtatagcatcacataaaggagagaacaacccacgatacaacgatcatcggtcttataaagagatacacggagaagaaaaagcggatactatacgcaaagcacaatctgaatcaagaagaggaaaaggtaattcccgcgcggttacgtggaaatttacttcccctaatggagaagaatttttagttgaaggagaatgtaaaaagttttgcaaagacagaaatatttccatgcgtaaactgaaaacctatctgggtgaagtcatcacaacatgcgataaaccctacgatatctctaagaataccgtaggatggaaattagaaaagattagttgaatcttcttttacgttcgtcagccagttcttttttgtacagtttaatgtacttcccgttaaggatgcgaagctgttggaaaactttgttgcacaaagcacgtttcgctttgtattccggtgtattgcggattgattcgatcgtcatccccatttcatttttagggtacgcgctcaactccctgccgatctctctgtgccagttgcttaactgatcacgctgtgctttgtactcttcaaaagttaacataacaatctccggtttcgtttctatgtgtgtaaggtatcattaccctacacacaacgcaagcgattttattttccgtaaagaacacaatattctttatatttttcacgggctttttcttcattactaaaggaaactcccgttccaaaatcagaaccttcgaacgtaacatcccacgattcatacccatcttccgaataataggaaagtgttattttacgatcttcaagaacaagttgttcaacaacaatatcaatttcagtagtcatagttcatttccataatcttttgctgcatcttcgggggttgcattcagtctgtaaagctcaacagctaacggactgggttttatttcgcggttcaggatctcactgataccgcgaaggaattctatataaggacggaatctcatttgatacgtaccgcgttaaaagcctggttgcgcagttcataagcctgttcaagctgttcagtagtgaacagaggactatcagtgttagtggtgaaactgcaaatggttttgttgtcggcgttgacttcttcgacaacgatttcataaccccagatcccgctatactcacatttcacgttccggtacttgatgtaaaccgcagcaacatcttcttttttgtagttccggcttttgtagatgatttccatgatatcctccttcgtttcgatgtgtgtaatataacagaacagggttatcgagttttagcaattcgtgctaattataccattttcttagcgattttccaggaggctttgaacgccggaacatcttcaatatcaacccagaaaccagatccgaaaccatcactatagcaagggcaaccgtcgcagtagttttcccaggtcatcacttcaccaccaacagaagcaccagtttccatagctcgtaacgcatcttcaactttttccagtttttctgcgttgttgtcataaatgatgaagtaccattttccgttgtattcgttacccagtttgattgcttcgcgaacaagtttcatgatgatttcctttttgtctgtttcgtttctatgtgtgtaatataacaaaacccctaaccataggcaaggggtttttgcaaaaattatcgtttgatcggggtattatctataacccgttgaatttccgaacgcatcgtagaatactggcacaattcggtaagcgcccgatccaggtgcatcatagcgtaagaaaactcttttccgcatttgtcgcatcgagcgtataaatgtaaatggatgcgcccgatcccatctacctgactatatttctggaatatgtaaggatctgcacctcgatagccagttgcttgatgcttacactctcgtttgaaccatgacattaataatatccttgtacgttgaagcgatcacataacaattttcttgtttggttagtatcgctttggatagaatgcaacatagcgctgatcatgtttaggttattttgcatcatttccgcgctcatgagaacttccatacgcgcacgtaagcgtttattttcttcttccaactcaaccatacggtcatatgctttgatgcgctctaagggcatatcaggacgctctttgagtacgcgagcacgttcaacctcacaagcatgatttgctttccagtggttcgattccgcttcaaatttattaaggcggcggatctcttcaaccagctttttgatcatgtgtggatccatcatgtcgatgaatttcatcaagcaattggattttgtttggttgtcagcaacagaccaagacgaattatacgtaaccgtaaacgtgcggcccatttcatcaacaaccccgatcttgttatcatcggtgattgtagccgcccatttatcccgcatggctgtacaggttccactggcgacactatgcaacttgtttaatgttgcgtcatcaaacacaatttcatcactcatgtatgcctcacatagatttcaaaatacgcagaagtgcgttagtaaagatatcaggaacacaaccaccaaacaacttatgattcatcagcgctaatttcatgctgtgattttcagtatatcgcccgttatggatcccccaggcaacgacattaccaggttcatgaataactaagttagtgagagtaacggtcatgcgctctttatcattgatagagaatgaatagcagtaaccggatccgatgtcgccgtaaaggttaaggtctttcaatttcccttgctcatgcaagcgtttcatatgaactgcacatgcatgattaatagtcatttcgtcatccctagcccagtcatcaataccagaggtataacgaatattgaaatagttagtcagttcatttgatacgctcattagaaacctcacttttataaaattctttaccagacccattacagctactgcatttgggggaacggttgttatcataccgccctgatccattacatgcaacacatttccgtaatttccagccatacacgaaccgcatgtaataatcggttcgtgcggccttgcgttcgtggaaattcatactttgtaaacctgaaccaaccacatttcgatgttcggcgcgtaagtaacgtttaccatcggcatagtgcggtatttgtaagcggctttgtacgcatcgagttcagtcggaacacagaaagagaaaccgttgtcataacgttctgcgttagaaacttcacaaccaactacagcggcaatgtttttgttcatgttcatgatgttttcctttctctgtttcgtttcgatgtgtgtaatataacaaagcccctgcatttctgcaagggcttttttcaagttattcgaaatttgttggcaactgatctacaattacctgagtttgatggatttcttcactcaatttatcgcggtaatgaaccagttcacgggttcttgatgcggaatagctaatgattttatcagcggtagcggtgtaaccgtaaccagcacatgcgatttccagttttgcgttatcgccattcggtacgcggatatgagcatacgtcagcaagtttttaaccgcttgtaacagttcatgatcttctttaccgatgataaactgatttggttctactgaatcaatgttcagttcttcgtctttgttcattttgcagccttatacatttcaaggacgcggttcatatgctcttgtgattgaggcacacccgcgaagttcagtttgatgaagaattccagacgatcctttttggtgcattcatccagccccagtgcaggtaatgacatattttcaaaggttcgctgttcgtgtcggggtagttcatgccagaataaacgggaaccgtccggcataggaagaccaatttcaccttcgtaaaatttgataatcgtcgtcaggcgttgtttaccgtcgatgacttctacccagtgagtttcattgaactggctatcaaccgcgatcgcgatgacaccacaagggaaccccgtcattaaggtagtcagaaacgcatcttgttctttctgcgtccacacgtaggggcgctgataagatggattcagatccagatcattatgcttccaccagttgagataactcccaaccatgatcgcatgatcgcgactacgaaaagttcggagttcccgaagtcggttatgaaccggaatatcatctttagacatgattcaccacccaacccaacaaaccagtattgatagccgcaacggtaaggcaaatcaccgcatacacccgcgcgttgtgaactttggttttcagttctgcgatctcctgatccttttcactttcgaactcttcgcgggttccatagtaaccaggatcagcagcggttgcgggacgaactgcatctttttcaacgatggttgcataaccactcgttacttgcgttgcgccgtaccagtcaccgcgatcggtgttgatgatcaagtgatcacccttcgcgttagctttatgcttcgacttgccaatgacaattacacgttcaccattcataatataatcactctttcacgttttgttgtaagaactctaacagctttccttcggcctgtaaagcataaagtttattcaactttgcgatgttttcaaagtctgatttttcgctgaacgaccagacaccatcatcggaaaccagcgcaccgattgatacgccagtttcaggatcacgcgtcaacgccagccccaggggatgcaggatatctttattgattttccataccagccccaattgagataaggtgttgaaatcaacgtgactcatttaggcaatgccccgaaagacagcagccccatacgatgatcgttatctgattcaccagtgctaaattcaaattcttcaccgctgatactgatagcgcggaaaccgtctttcaggtatggcaacagatacagagggatcagcatcatgtttgaatcgtcgctccacttacggaagcccagatttttcatttcttccagcgtcaaatcattcggatcgacgggttcgaaatcaggggaagcgtaaaggcgtccaggcagatcgcgaatatttttcacggtgaatgaatcaccccatgactgatacgcgataggttcagcggcgcgggttgcggtagccagaaggatcatttgacagatttgaaaagttgttgctttcatgatgtatatcccacaagtttagatagaagatgtcccatagtcttacgcgcatgatcgcggatctggctatacggaacatatttgaaaccgtccatttctgtgatggttcgcccgttcttcacgaacgttgacgcacagaagcatttatcggcttcggggtaattattgcctttatacacgaataagtaaagctcttttttactggtataatccagtcttccgaggctttccagttcgtgcggttcaacaagaactccagtttcttcgaagcactcacggatcgcagcgtgaataggttcttcgcctttttcgatatgcccctttgggatgtcccaatgaggcgtttcggttgcgtgtcccattaaaacgctgccgttattcaggaagagaataccagcagaccgttccattactgtgctccgaacttacgatcgtatgctgccagcgctttatctgctgcatcaactgcctgagtgtgtttgttagcggatttctcgctgaacacttcgcggtaaatggcaacccagagggatcggcgggtctgttcgctttcttcattgacgcgagaagccgcaaaagcgttatgttctttgatcagttgtgcgaattcagcatcatgatcaatggtttgttgttgaatagctgtagaagtcataattcacctatttctttcagttcagttttgagtttttcgagagtcgattggtactgaatgccgttttctggatttggcagacgggcataatacagcgtaccagttttgttgatgtctgacaacacctcttgatcgagggtagccggatcgatgccaaaagccattttaaacatggtttccgcgtctggggcgaatccgtgagagaatgcaaaccccagctttttatcaaactgcatcagggatactttgttacccattgatatcttattccccataatgttcttcgtaatcctcgcattctgggagataggtttcgcagaacatacacagcgtgaagaatgtaggctggcgaattccgatattatcgggtaagtacatccagaacgtgttagcaaacacgatgaacgttttcaggttttcaacggttacggtactgataccgtcataaccggattgagtaattgcgcgttccaggggaacagggtattgctcgcagtagttggcgtaatgttcgcttgtcaccagcgcattagccgcttttacgagatcggtaattttcattcaatatatccccaacgaatttttacgttatcttctgacgccggacttgtaggagttgggtatggataactttgcgcttcccacagataaacaatggcgtgttttgtcaattcttcgataacttcatcgaaagtaccgacactggtttgtaaaggcaacgagaaaggtttatcgttggtttctacttgagcgattggcccatctaccaagataacacgaaccgttgtgtgctcagacatatgagcatagattttgtttttcatgcgggtacatattccactttgacaggttttgcgataaggcgttctttagtgaagccttgcccgttacagatatcacaagtaacattgaagtcttccatctgatcaacccagccagaatccggtaagccagaaggatacgtgttaacacgtttgacttcgaaccctttaccctcgcatttcgggcatttgtgtgggtactgggatttaaccatactcagcagttgccccagcgttgttgaacgatcgaagcgttcgaccagtgccattacatcagcaatacgaatcgaaccagcatcaataacggtatacaggtttttcggtacatttgagcgcatagtatatttctcacttaaaaaattttttgatgaaagagaggaacaagccaccaccgaacatgatccagtatcccgcgccgtcaccgttaaacaggacatacacagcgacaccatagcaaaagatttccgcgatattcagtaagtttctcataactccctcctttgtctacaccaggtattttaccagaaagtagattactgtcaacaacaaagttttatcaacccacttatcaccagtcattagtaatcccctacaggttgagaagatgcaacgctcaggatacggaaagagcattcattccatttgcaataagttttcgcacagtgaacagtgcctttcattacaaacccgtttgagaacaccagccagtaaagtttcatgattgcctcctttgtttcgacacccctaatataacaaaagcccctgcacgaatgcaagggcttttttcaaatatttttcaacatgtgtagttgaggcggacaatcttttgaagcaatcaggcgatccaggcgtgacataacgcgtctgtagccgtcatactcgaacttgattttgggtgcgatgtaatttacatgtatcgcgtttcgcgtgttcaggctcaacgtgtactcagggataacggttcggaatcgtaaagcaatcactggcttttcgtgagcaaccgaatcatccatgttttcgaacatctggacggtgaacgcacaggcaaacactttgccattaatccggcgatatgcaatgacttcctgcataccttcgtttttcgctttcaccgcgtaatacagaacgttacacgaataatgtttagcgagactattaagaatttcactgtagatctcaaagtcttttttgactgacgcggaacgatccaggaatcggtctgcgatgtgatctgtagtcattgaaacctttgtcacataccaatcacttaacgctttactgaaattttggttaacttctctgcgtaagttattgataacatacatcaatcgtgctctgttcataaatcacccattatgtttaaagtattcgatttgacgcaaacgcttttcagcggcggctttcgaatcgtattcaccaagttcttttgtgcgatcgtgattcaaaacaacccacttatcgccacgctgttcaatgtgttctgtaatatcttttaacgacttatccagatccagtgattcagcctcttcacagataatagtcaaatccacgggcagtgtcaacaaccttttcactccgctgatatcatcaagcatcgaatcgtatgcaagggttacgtgcggtttgtaatccggataatcgtatgttgcgccagcatcaatagaatctttgaaacggctatgcaggtattcagattccaggatccctacgatagtgctaccgtattttgtgtcccacttttcaacatcaaccagtttagcaggttctgtgatgtcctgttgcgggaacaaatcaaccgttttccggctgtatacgatcgttgtatgcatcttttcggctgaaacagcattctttgtgatacctaatgtcttttgaacatttttcaaagcctcacatgaagcctgatcgaatttagcacacatgtagataccaggatctacaacaggttttgtgatttcaagaaatgatttcataaaacaccccaataaaaaaggggccgaagcccctttgtaataaatttgtttttacgcttcttcgccaaaggcggcttcatcttccgcgcctttttcgacttcaacggaagggatcagagcggataccgcgccaatcactgcttctggggttactggctggcttgcgtcaatacccagtaccgaacacaggtcggacagaagttgacgatgaaccgacagttcactttctttttgcgcgataacttcgttaagatcgaatgcgcggcctttcagtaccagtacttcattttgcagtttttgaatatcagacattttattacccattgttaaaatttaaaagtatcgagcactttgctctttagttgtttcaaagtaccttcgttagtgatgatactatctccaggttgaggtgtcaaacctttttccgtggaatgttcatcaacaattccggtatcctttacaataaacacaaacttagcacccaagcgtttcaggtatttatattcgtgttcctgacgacagtcagttaccagaagatgattgtattcgtcaccagcatatttattgacgaatctttccagtgtgtaacgaacccaaaccgtgttatcatacttgcatacgatatcagttccaaacacttgcatcaagcgtctgatactccagggagtatcgttactcataatcagattatcaatatcatcaggactataaacaatattgtatccacgttctttgaggatttcaagcccgattttgaaaatatttagaacatcttcattagacatcacaagaggtttctctcgatcaccttcgtaaaaaatagcatccggatcagaatattttccttcaaccagactacgaatgtatggtttagcgtaaccatatcgctgcattgctactcttagcgttcttttgataccaaatgccagtgcttcacactgaacatcattgtacgcctcttgaataaatttagcaaccgtatctttaccagttcgcttttttccactaatcacataaatcattagctcattctcttttgagaagtgactacttttccgtcaatttcaacttccatatgaaggaagccaaaagttgccatacacgtaaccgcttcatcactatcgttagtataacccaattcaacctcacccaagtttgttgggaaggcaccataaaatctaaatgtggcgatcgttttcatctgggagttatccaggatatgcacagcgaatgattgcttaggatcatcccacgcaacagagttaaactcgttgtaatcgtttgtgctcaacatccatatgtaaatcccaagatacgatctcatttcctcatcgactacaaagcggatcatcaaaggatcaaactcaaaagccgaaccaggtactttacctcgaaccatcatatttgcaggaatatcaactgctgggaggttcattgatggtagtgtaaccccttgaacttgtaaagtcaaacctttcatgtaactgttatcaggaatatcaacccgaaagtttgtaggtgagatttggtttaaaatcatttctgtagacataggatctcctttcctctatttagcggggaacgggatcaaagcggcctgacggggtaatataaaaatttgaagaaaatgcttgaccttttaaaatctttgatctataataattattaattaaaattttatcaaaaagatctaacaagatcaagtaaaatttaataaataatttattaaaaaattttagatctgatcttgaattcataaattttatgatctataatatattaatattttattttatcataaatttttatgaagatcaatacttagatctaataaattttatgctttttctgaaaacttttcctttaccccgtcactaaatactggtactatgttcccatattggaaatcaggaaaaacaaaatgactcacttgaaaaaattcaaagaatttctgaccgaaggtaaaaccctcgctcgtaccgtagcacgtggtcaacgcgctaaaacttccgataaacattcaatcggttttcttcacttcaaacatggttctgatttcgaagttttagcaccggattctcacgatctggcatacttcggtaaaaacattgtacgtttgaaaggtatgactactggtaaagttcaagcggcttatgtcgattgggctaaaggtactgtttctttctacagtggcaatccggatgatgatctggatttcgacaaaccagaaaaattcaaagctgctactctgtatgaagaggcggaagaaaatctggatctgtataaccagttagcagaagatttcgaaatcgagatccctatggatgaagctctggtgaaaggtaaagtttacaaactcccaagcaacgatatgcgtcttctgtacactgggcgttctaaaactaaagcaagcggtgaatatgcagtgtttaccgtagttgatgcttccggcaaacctcgcctagtatctggtaaaaaattcacccaggaatataaaggcgatatggtttctaaactggttctggctgaatccgaagatctgaatgaagcggctaaaggcattcgcgaaaaagttattgctgtgatggtgaaacgcgggtttaacgaaaaagatgcagaaaagatggttgacaaaaacctgaaagatgctatgaaagttagacctggtgcgacccctggcaaacttgcagaaatagttagcaccctgtaaaaataaagccccttccttccggttggggctttttgattagtatttgctccagacttttttcgcgccgtaaggtttccctttggacataaattgttgagtcggtagccaaacagctttcgcccaatctttaggggcaatctctgctaatggtgatttgaggtgtgatggtagatatgctttgatcatttctgttgcgcctcgcatacctttcacgttaccccagttaattttaagcacggtcttgttagagaggcgtttggtggatccgtacccacgcttcaataactcttctaaaaactcctgtcgtgctctgggtggcgcatagtgcaagttcaaaccatagaacactaagttacccgctttcgatcttccggatcctaagaaaataatcagtggaaatctatcccaatacggcagggtgtctttatattttgcatcatatgcaaacgtgtacaggcgacccgttgctggttttgccacacggtgtgttttgatactggttttgatgaaattaccaaaccattctgttgaatctttctgtcgctttgccgccgatacaccaacagtgatctttttcagactattacggaaatcgttgatgatctcgatcccgtgttttttacggtagtcattacgttttttacgggcttctgtctctgcggaacgtcgttcaatctcatcatcaatctgttttttgtaacgatgcattgactttgtgaacgttgcgtagtttaatccctcagaatcggcaaaacgtttagcagaaacacctttcgtttttgccttacggaatttgatccccagttcaacccaatcactcaatttgcgtttgggtggtgctttgggtttatcctcttccgcgatgatctcaaactcaaaaataaaactcatgtttccctccagggattactgacctcgccacccaaaaacttttttgagtgattcttctgttacgattttgaactgccagcctttttgacggcatagctcatttgcggctttccacttatcaatattaactgtataggtgtaaagagcatcaataaatttctttttattgtgtacgttgttgtttactggcttcggtggaggcatggtttctttaaggggcttaacctcccaaagatatgtagtaccattttccatttccacatagaaatccatgtaatagcgtcttctcttaccgtctgcattgcagaaatacgggatcactatacattcagaattccaacgttttacgtgtgggtttttatccagccacttcataacgtagcgctcccacgatgacctatacgtaatctttcgcggatcgcctttatacttctgtatgttttcgggtacaaacgaccctttatacgtctgtcttccagccattgcgtaaatcctaaatagaataatataacgtttagataggggaacttatcgtgctattttcatacttcccgcctgttgattacaaaggcacccagacaactgatattttccgagactatcgattttattttaatcgtgtgattggaaaatataaaacccgtagttaccagataacaggcacactacgacctgaacaacttgcagaatcattatatggaaaccagcaatactactggatcctgttgatgcttaactctgtttatgaccctttctatggttggatctccgatcaggaagccgcgtatcagtgcgctatacagcgttattctgaggttggcggtgaacaggttctgtatcatgtagatgaaaacaacaacaagtattataaccttgtcgaagaccccaataaccctggtcattggtatgacaaaggtgacaaaccaatgctgtatttacagtatcaaggtgtattagctcctgtagatatttatgaagatgcagtgttgcaaaatgaagcaaaacgaacaataaaaatcattagtccgtctgacatccaggcgtttctgaatgattttattaaagaaatggaaaaggctaactcatgaaattaggcggaaatttacactcccctttctttgatggggtggttgaaaacgttgatgatccgcgcgggttgggccgtgttcaagtccgtgtatttggacaacacccagcccaaaaacaaaaatccgatgcaatcggtgttcctgttgaagatttaccctggatgatgcctattcaggatattagaagcgctgcgatctctggtgtgggcttctctccaactggtatcactcgcggatcctttgttgttggttattggcgtgacaaatggcaccaagatggtatgataattggtactgtcgctggtgaatatgtcgaacaaccagacacacagaaaggtttttgcgatcctatgggtgaataccctcgctatgttggtaacgatgttaactcccttgctttaggtggtttgaaaggcaaaggatcatcaagtgtcatcattcgtgattcaaacacaagcatagcagtaaacccagacgatcgcccactggatgagataccagaagataaccgccctgatacgggtggatttacgattgaaaagatgctcaagcaggatgaagggatccgcacacgctggtatacagacagtgaaggatatccgacaatcgggatcgggcatttgcttatccgcgaaaagactcgcgacactgcaaaaattaacgctgcgatcagtaaagcggtaggtcgagaagtaacaaacgggacaatcacggcagaagaggtatcaaccttatttgctcaagatttagccaaagtaagatctgatattcagagaaccgctaacgtccgtgaagtgtatgtgaacctaaaccgtcctcgtcaaatggcgatcgaaaacatgtcgtttcaaatgggcgtcggtggtgttgctaaattcaccaataccctaaaagcgatgaaaaatgaagattggcaagcggcttataatggtcttcgcaattcactgtgggctagtcaaactccaggccgttcttctcgagtgtctaaaatcgtcctcacgggcaaccttgaatcatatggggtgcaagtaccagatccggaagggcgctctctgagtgctgcttacgctgcgtataacggtgctacattgtcggctactagtccggaagatccgtttactcctggtgatacccgtgtgatgtttgaagaaccagcatcatcttataatgcggaatatccgtataacatggtgtttgaatcgagatccggacacattcaggaattcgatgataccccaggatacgaacgatataaccgtgttcacccagcagggagttacgaagaaattcgcccggatggaacccgcattgttaaaatcgtaggggatgattatcaaattgtgatgcagggccggaaactcaatgttaaaggcaacttgcaggtagttattgaaggcgacgcattcatttacaacatgggtaacgttcaacaaacggttgatggtaacgtaactgagtttgttcgtggcaacgttcaacaaactgttgaaggtgagtacgttggcctgattaaaggtaacgctgaactaactgtaaacaaagatgcaacagttaacgttgatcagaatcttaccgcaaatgtgaaacagaatgcaaccgtagctgtaacagaagacgcaacgatcactgcaaaaaatgcgaaaatggagattgaagaaacgatggatatcggtgctaaagatatcaatatcaaagcaacgaataacacgtttattgattctggcgcattaacaaaaatcactggcggcaccgtccaagtggggtaattaaatgattatggattatgaatcaataattgatggaattatgcaaaattatcagcatccttgtgatgctgagatccccgctggctattatcggcgggttatctggcaagggcatacagaaaattatccggctgttggggttgagtgggataccgagataatcaaaatcggtactcatctttatactcaagaaccgttcggacatagaagcacggatctacctgttgtcaattcaccgggaacagatccaaataccggacaaccaacagggatccttgttccgaagattggctattatttcaacactcaagcagagattgatgcttacattacatccatcggtgcaactaaaatcaatggtggtaatgattggtacggcgcggatctgtcaaaatcaaacctatacaaaaaccctggcgaactggctatgtataaggttgaaaacagtggcgggtatctttccggaacaaaccctgtatgtgatgctcgcatacgtcaggcgtataatcaggacactggcgcattcaccaatattgattattattggaatggtaatcgtatagcatatatgaagcatgacgaaacaggggcgcaccagtgcaaatatacgggtatgcaggttaacaccaacgcagatacaagcattcctcctgttcctcctgcaatgccttccacttatggggcattaccgagtgaattaagccgtgctgatatttcgtgcattccggcaactgttggtttcgcatatacaaatatcagtgatgctatgttacaggcatggaacgaaacccgtaatacgttcaagctacagtttaacatgttaacgggtgctgtacagaatggattcgggatcgcgacgatgtttgatggtttatccgtatcgatggaagaagtaatggcgggggcgctcgcattgtcacagcaagcatggcaaactgctatgaaagttttcagacaagtgattagcgctgcatttaacattatcggtggtgcatggggattgattaatcagttcttgcctcaagtaaccatcttaggtgttgcgatcaacatttacgatctggtgtttggtgataattctgttcagactttgaaagatgcgtttaatgcaatcatcaaatccggacaacaaacatatgaaaccgtcataaacgcaatatacggggccataggaagcgcatacaattactctgtggaatatgtcaaagctggcgctcgcgaccttgtggatgcgtgtagcgcgttatttgattggtgtttaacgatgttccaaaacggttgcgttgcattaatcgacttatacggtcggatcatgcaaacatgggctatccctccggaagttccaaacccgttatggtctgcggtgctggctatccgtaacatcatgatgcaaatcaaaccacttgatataattctgggcggtaacttccctggatttactgcaatggatttatatcaacaagcacaggaaaaagtcaaggcttttgttgatgagtcatacgaacagatccgagggctttatgaacaagggcaggaactttacaaaacgttaaaaaatcagattttcgaacgtgatgcaattcagagaaaattcaaccagtacttaaactggatgtggggcgctgtaacagacgaagcaacagcggcttatcaatctgcattggatgttgcaaacgctgctgtagctgcaacacaggccgcgtatgacgctatacaggaacagattggatctctacaagatgcaatgaaagatacatacagtatggcgatggaagaattaaagaaattgcctttgatgagtacaataaacgagtttttaggcttctgtggtgtcgcatttgacgatcttctcaagtcatatgaaaatgcgattactggtgctcagtctctgtacaaaaatttcattgatagttcgcgctcgtttaaagatcactgcaaagtaatctacaaccaaatttgtacgctggcgttgagtaaagtcacacaatatgtgaataaattgctgtctctcataggattagcaatcaactttggttcgattagtgtatgtgttccagtactgaaatactaaatagtcgaatgatcaagaggaatttataataatggctactgctaagactaagactgtcaaaaaacagattaaccaaatccccgatatttttatcgggggtactttcgaagaaattaaaacagatctgatcgattggctgggtggacaagaagagtttaaggattacgatttttccggctcacgaatgaacgtactgatcgaccttctgtcgtatgctactctttatattcagcagatgggtaacacggctctatttgaatcgtttattcgcacggctgcattgcgtagttctgttgtacagtctgctcaagaactggggtatatgccagattcgcgcacggctgcaagcacagcagtaatgattacggctgctaacccactgaccccaacatcgatccgtatcccgcgcggtacaaaattcatcggtactgtaaagaatacagacagttattcttttgttgtatcggatgacgttgttatcgttcgtgatagtaataacaactatacatcaatgctgaacctggtgcaaggccgtttagttcgtactgaactaatttatgacggttcaagtatcctgatccgagatccaaacattgaccgtagtcaggtacgtttaactgtaaacggcgcacaatgggaagactggacaaacgaaagcattgtaaacgcaacaggcgcaagcacgatttactacatgcgtgaaactgttgatggacataccgaagtttatttcggtgaaggtgaagcaagtcaacaagtggcgggtggtgcattaaccgctgaatatatcgggggcttgaaacctgctaatggatcgactatcgttattgaatacctgtcaaccgatggggaagcggctaacggtgcaaaagattttatctatgtcgatacattaaccaatattagcatcactaacatcgaagaaaacccgactaaatcccctgattatgtcggtgctgatggtggtggtgatccagaagatatcgagcgtattcgagaactggcccctgttatgcgtgaaacacaacgccgttgtgtaactgcatcggattatgaatctttcctgtctcacagatttggttctatcatccaggcggtacagtgctttactgataacgaaaaacctggttatgctttcatttctgttaaaccaaagtcaggtttgcgcctaacatcggtacagaaagaagatatgcaaacgtatctttcgaaatataacctcgcgacgatcaccccgtcgattatggatcctaactatctgtatattgtgcaatctgtcaaagtaacgtatgatatcagtaagttgacggaatcagaggaatggttacgcggtcaggttatttcgtcgatcgactcttactatactgacaacgttgaaattttcaacaaatctttcagtgtatctaagatgttgacttatgtcgatcagtctgatacttctattattggttcggaagcaaatattaaattgctccgtgaaattgacaactattacagcgcccctatgtctgggatccatttcttgaaccaggtggaatctaaatcaatcatttccagtacgttcaagttcaccaacgaagatgacgaaagttatgatgttcgttatgcttctacggcaatggatcaggatggtaacgcaaaaattgtaataggcccgttcaaggatggggatatttcgatcgctgcttatacaggcgatgactttgaaaaattaacagatgcaggaacccgtaataaatattacgaagttggatcggtttctcattacaccgatttcattagctttgacctgggcgttctgaacgtatccgccgatagtttcagcgctgcttatatcgagctaactgcaaaacctctcgaagaaaccatttttactcgcgatggttcgttgatcgtgtttgaaaatgacctgcgtcctcaatataccacattgactatgaatcctatcagtcaataatctttaacccctgtcttcggataggggtttttctttttataaatacgtgatatacataaccgcaaatttggagaaatataatgattaaagcgccttcgattacgagtttgcgcgttgataaactggctgctaacttcgtttaccttaaatgggatgatgttggcatggatttctattatgtggttgaattggcccgtagccgtgatatggacggaactattattccagacgaagagttaatctggacgcagttgggttatagctacgaaaacgaatggtttagcgatcaggttgccccaaatacacgttataaattccgtattcaaacaactcatgaagggtttgaaccttctgattgggtgatcagcgatgaattatggacgtttgatgagaacgcctacgcatatacaaccatgcgtgaattcacccctgctgattcgtttatcaatgaaaaattcgccaaaaacaatcgtgattacgtcgattttaacgatgatgttattatggcttctctgatggttgaggattttgtatactctcccctgtattctgatgtaagccagatcagcgataagatcctgaaacaagaaagctaccatgaaattcaagatcacatcgaacacgtttgtaatgatatagatcgcacgttcctggtatactcaaacggattgctttacctgtttgaacgttttcagaatatggctaaagtgtcaaatgacaaaggccaaacgtggtattactacaaagcattaaacgatcgtgtaggcaatccggtttcccgtaccattgcttatcagagcactaacactacgtatgtgttaggatacgatcgcatattttacgggcgcacgtcaacagatattcgttggtcttctgatgaagttcgtttttcttctgatgatgtaacgtttgctaagctggggaaccagtcagggttagattttgatgttgattcatacaacacatatgcgcgtctaccgggaggagtgtcgaagtatgccgaagctatagcttgttctaatgaatggctctacgtggctgctaagaacgttatgcgccgtattgcgttacgtaacacaccaattgatactgatcctggttcgccgacctttggtgaacgtatttttgatgaagtttcatataccatcgtaccaggaaatgataaaattgttgttaaaaaaatggacgtgctgaatgatcgtctatacgttctggtaactggtgaagttaaaacggcgatgatggatccgactgtcaaggctaacgtgatcccatcaaacgatgctggcgtttatctgtgggatgagaatgcaaagacgtttacccgtgtttatggtaaaaccgaagatgaacgtttttatatcactcatgaatatacaaatatgtcaaccaatggcgatgaagtttacatttctgttggtaactacaaatatccaggcactttgccagatccagatctggttgaaaagtatccggaagatgtgcattcagcggtgaaatacgatcttgttcctggttatactgcgagcatttcgattaactttgctacagttcgagcaaatcagaacgatcctactgtttggaactttgggccgcaagagtactacaatgaagcaaactttagctggcatttccgcgataaggttagcacatggatcaccaatgataaccgtcctctggtggtttatccggaaaccctgtatactctggttactgatagcgcgtctcctgcgtcaacgattcgtgtaaaccatgaagtttgggacaaaggaacagttactatctacttgaataatatcaaatttactggttttacgaagtacacaaacggtgttctgttgtatcgctcaggtggtaggataattggattctatgaactgtcataccgcgcaagggatgaacttactattttctggaaacctgataacactttaatggtggcaagtctggttaatcaggaacgtgaaaacccatacacgccggatattgaacctggactaatagatcctgatctgagtcacatgattactcgttttgctccgcaaagctatctggacaaccaacagttcgaaaaatttggtgaatactatctgcaatatatttcgttgggtagcaacagttactataacaaattgctgaacctcatccggaacaaatatccgagagagaaaaacaacgttgaatatttgtggtctgaaattaaccgccgtaacatttacctggataaaaccaaacgtgaggcagtggttagattttttgaatcacgtgcaagcgatttctattcaacaaaagggattgaggcaagttatacgttcctgtttaaattactgtataacgaagatgtttccgttgagatcgaaagctccaacagtctcgaatatgatattttggttagttcaacaaatatcagtcaggatatcgtaggccggacgatctatacaccaactggacgcgctaacgttacatacatcgaacgtgaatatgaaaatggtcaattgcgttggtcaatgactctgcataatgctcaaggtaactttatcgaagggcaggttgtcaagtcagaaaaaaccaatttcaccggaatggtaattcgtggtgttcgtggtaaacaaatggctaacaactcgatcgactatataaaccgtggacgctcttactacgtgatgaaaattcgttcaaatctaccgacttcccgttataaggatgacgtattgaggtttgttcatccggtaggattcggcttcatgggtattacgatgttaacagtattcatcaactccggtttgtcaatgactcataacgagacaatcattgatattctgagaaactaccgtttcgatagtggttatcctaagttctggcctgatcgcattgcgagcatggacggtaacggaaaccaacaattcgacctggttactggtgaacctctgtacaccgcacacccgcgagcgggggaaccttttgatgtacctccggaatatgacgttgaagaaaaaccgcttaacggtgttcttccttctgcgcgacggttcgatcaaagtccgttgttcgattgctcaggcgttaaatattcacagttccgtaatttggtggatagacgactgaaagatgatgcaggaaacccacgtgatccaaatcctccatcacagattaaggtaggaaattaaatggcacaacaaaacttgtatcggtcggtaattactgcaaaattccgaaccgaaaacttgatgaacttcaaagatatgatcggcgatgccgccgatctaaacacgatttatatgtctattgggcgaactgaatcatgggcggataacgaatccgaccctaactttgccccgccatatccaaatgatagcaccgatggtgttagtgatatgtggacgcatatgatcggggctactaaagttcctggtgatatgatagatgcaattttaccacgtaaagactggggtgatactcgctatccaaacccgaaaatcttttactttaacgatattgttgttgtaaacaccgcgccttataaccgtactgatccgggtaaaggttggatggtttatcgtgtagttgatgttcctgatatcggttcttgctccatttcgagcattaccggaaaacttgaatgtatcaggatcggcggtatctggagtccgtctcatgaatctagtgaacctccacgaggagaagctaacgggatcgacatgggagacggttataaatgggaatacctctacacaatcccgccagatgtcgtgatcaaccgctgtacaaatgaacatatcgtagttcctttccctggcgaactggaagaggatccggtacgttggggttatgataacgtgattcaatggtatccaggacaatacgatctagtgtatcggttgaaggtgaattcaatgcgttttcgtgcatacatggattctcttttcttcccgcaatctacgcttcctggtaacaaagggttccgtcagataagtattattgtaaacccgttgattaaaaaggaaagcccgaccgaacctgaaaagaaagcaactggtgattactataatgctaacgcgcttgaacctgattccggacgtatgatttacatggaaaacagacaacctattattcgctcccttgatcagactgaggaagtgagtattgtattcgaattctaaggaaaaacaatggcttaccaaacagcaaaaaaactaattgatgtcggtgaaatcggcaacccatcaacaggcgatccgctttatgatggtggtgttaaactgaacgaaatgatcaccaacgtttataatgcgtttggtgatgtgcgtatgctgtctgcaaacgaaggtgtcggtaacatggtgatccatgctaccggatactatcagaaattaccacgcacttactattcaagtacaccgatcgaactgggttccctgcatgacatggatacttcaacaggttcgattaccgttgttcttccttctggtaaggttggcgaaggttgctacttcataaatagtacgggtagtgtctctgttgatcgtcctatcgcgtttcgtcctcaagttggcgatacaatcgcgggggttgcagaccagttgtacatcacgtcaccttacacctttgtaaaaatctggtgtaccaaaaaagaaggtgcgatcacaacatgggattattctgtagaatctatgttcggttctaaaacgatgcctgttgacactacggcgcttgtactgaaagcaaacccgactgctattcctatgttcggatatagcgaatttagcggggctaaggtgcttgtatacgcagaaaacttagctggtacagttaccaaaatggcagaagttttaatgaccgtggatcgtgtacacaaaacgatttattcaacggaatacgctattttgaaaaacagtgaagatgaaatgtttacattaaactttactgtcggtgctggtgatgttgtatacgctaacgtgcaagcgatcaaagaagatcgaattaaattcacgattaaagcaatagatacgattaaatcagggatcgcgtcatgaaacaagaaattttaataggtcagattgtagacgatggtacaggcgattacctgcgtcgaggtggtcaaaagactaacaacaactttacagaattgtataacatgctgggggatggtgagatcccccatccagcaggtgcctggaaaacttttgcgggtacgacgctatcaccaaaatttggtgaatcatgggcgttgaataccagtgcaaacaaaatcaccgtaaacctcccgaaaggcggcgtaggcgattataacaaggttattcgtctgcgtgatgtgtggtcgcgttgggctaccaacaacgttagactgatccccgcaactggtgatactatcaaaggttccccaactcctaaagatctgtttaaagattttatggatgtggaattggtgtattgttctccgggccgttgggaatacgtcgaaaacaaacagattgacaaaatcacaacttcggatctggcaacagtagcaaaagaaacgtatattgctactcagggacaaactgacttccctaacgtattcggtgttggtaatgaatacaacctgcaatcgttcgaagtttactatcgcggtaacttgcttttcatcgatgagaaagacggattcaatgctgataactcagactatggatcgattggttctgctcctggtgaactggttgcacttgatggtaattcagtacgtcttaaaaacccgtgtaacgctggtgacacgcttcaatttgttacctatctagatgggttagcaacatggcgttcgagctatgaagcgtatgtgatgcgcatgtatcagactggtgatacttctctggaaaccgttcctggtgaacagtgggtaggtgatctggcaaccaaaaaagagtttacacctgctgaatttggtgttaaccctcgcgtgttgattaaccctaactcgtttgaactgcttctcaacggtaaacaactggttaaaggcggtgacgctgactatccggcgttttcctgtgaaggtgcggaaggtgttgatgaaagtacgtgtgttggtaactctggtgtatgggttccgtcaggacaggattatagtttagtattcactgattctgtagtgacttcaatcaagtttgctcagaaactggaatccggcgacgttgtaacgatccgttggtttaacaatgatattggtactctgatggattgggaaggaactggcggtattaaagaaaaagctgataaggtttatctcaataacgaagaagaagttatattgacgaaccgtatcgaatataccgattataataacccttctcagaaaacaatgcgtaatacaggggaaacctatcagggacgtattctggatattcaggctatgtttgatattatccacccgatcggaaccatctatgaaaacgcacacaacccggcaaaccctgctgattatatgggatttggtggttggaaacgttacgcagaaggttatttcctggctggctggacatcaaatgcagcggatcctgatttcgcattaaacaataatgatttagatagtggtggtcaaccgagtcatacggcaggtggtacaggcggtgatcgtggtacagaaatcaaaatcatcaacgttcctgaacttgtatcaaaagataaagttctgattgctgatgaaaatggtgctgtgatcattggtggttgtcagttagatcctgatgcttctggccctggatacactaaataccgtgaggatacattgaaagtgaatcatggtaacacattacctgataaaatcaaaactattccaccgtatatgactgcacatcgctggataagggttgcataatggcttacaacaatatttcaaaaacaagggagggcgctcgcgtcctctctaaagaagcagattacttacagtatgatacttatggtaagttgcctctgatcggcggtaaacgttcgatcggcgaaccaaacattgaccaaacaaaacgcggtgttctgtatggaaacgtacaatccgcaattgatgacctgtatacgcttatcgagcaaatcccgattaacggcgttgttaccatgactgaggatgcccctccaatcgctgtacagcaggttgagagcgtttcttttgatggtattgtacagaacatcgattcagaccaagaacaggctgtggttcacgtgtacggctttcctttcatctttgataatgggactaacgccgcaactgtttgtgaaacggcatacaacaaatttactgaattcgttgcagcggaaaaatatttcgcagaagttaaccgtaaaggtgttgatggtacgatccttgaatgtcgatttattgatagtgttccgcacccggcaacaaatatctcagaaaacggtattcgtcaaatcggaactatcgacgtagccgcaaaaagtggctatggttcatgggttaagttgggttctggtttcttacctaatgttactccgcaagtaaccgtgtattacttcaaacgaattgcataaggataacacatgagtaacaatacaatcaaccacgtaagtgataaatccatttacgtgacatttgacccaacaggtactgattggcctgataccataaccaacgtacaagatgcgttggaaaaaataggtagttgggcgcgtactgatactgggcttcctatcgcaacaacttctgttcgtggtattgctcagatcgcaaccgaagctgatattgacgctggcacggataacaataagattgttactccgaaactgttagcatatcgtatgcagaaccctaaagcatcacaaaccgtatggggttatacgaagtattcgactgatgcggaatctacaaccgtaactaacgatgcatcgtctattactccgcgatctctgaactatgtgttcaataaccgtaaaggtacagaatcggtttggggttcttctaaaattgccaccactgcacaggcggttgctggtacagataacactgtaactatgactccgcttaaagtcaagcaagcgatcgcgtccctggttccggttcagtcaagcgcgaccgaaagctcgcaaggtttggtacaactggcaacagttgcacaggttcaggctggtacgatccgtgaagggtatgcaatttcaccttatacgtttattcgtttaactgcaactgaaagcaacctgggcgttattcgtatcgcatcacaggcagaagcaaacgcgggtactgatgacaccaaagcgattactgcgaaaaaattaatcaatacccgtgcaactggatctcagttcggtgttgtcaaattagcaacaactgttggttatgtggcaaacactgcactttcttcaaacgctgcggtattacctagtgatcgaaatgcggtaattaacggttctctttatgagaatagcgcaatatataacaacaaatatcagacgtggacagatcttgattggcatttcccagtaggtgctattgtcatgactggttttcagactgaccacggtagtttgtatatttgtgatggtcgctcactgaataaaaataactatccgttactttttgagcgtataggttatacatttggtggtggcggtgattggtttaaccttccagattgtcgaggcgttgcagtacgtggtcatgaccgtgggcgtggactaaaccctaatcgtgggtatggtacatatgaaggagatatgttgggatggcacgaacacccattacaacttatctaccagaacggcggcaacattccgaaatggcaagcagtttacgaactgaaaagcgccgagaagaatgaccaaagcgctcgcgtatttgatgcttctataactaaagctactggtgtgggcggtgaagaaacccgcatgaaaaacatcgcattaaactacgtaattcgtactcaatagaggttattaaatgatcatcgacaaattaaatccgttgccgaagatcccgtttgttgatggcgtcccagatgacgccacgactcaaacgaagattctttggatcaaaaacggtgaaactctggacggttcgccagataaagtgtcaaacactggtagtcttaaccgaactggtgtaaacatccagcagaacgcggttcagttagaacaaaataccatcacccataatgataaaatcaacgaagtaatcgatcaggttaacttgattactgaaaacattgatgctattggtgatgaaagcgtaatcaaaaaagttaaccagttggatcaggatgttcaggcattaactttatctaacacccaaacacagaacaaggtagcacagttaaccctttctgtaaatgctcaaaacgatgaaattggtgaatacaatccagaaaaggatcctaaacaccgcacaattcgtaatgatatcatttacattaagaaagaagttggttcatatcctggatttaacgttgatggtgatgttgacccctcttctactggtactggccttaaataccgcgtactgagtaaccaacgtgctatttctatgcaggaaactcgcataaccaaactggaagatgattgggcgctttccgaagtaggacaactgacagaagaggtaaaagaacttcgtgctgaaatgggtgattctggtcttgccacaacccgttcaatctatgcgcgaattaagatccttgaggatggttctgttgtaatgcaaaatgaacttgatgcgattaatagttatatcggtcgcacgtcaggttcaaccagttccattaacgatcgtgtgaacagtatggaaaactccgttagttctctggctacacaaatcaacgatccggtaactggtatctctgcacaaattgcaaccataaatggtcaaattggtacggtttctgttcagggtagtatccgttatgatattgcggaaaacaaacgcagattgatggatatggaaatgattctaggtgaatccggtgatgaaggattgcagggacaagttgcgatcttaactggcgacattggcgaagattcagatcctaccagtatcaaaggccgtttgagtgttgttgagggtgaattacgcaccaacactagcgcactatgggaactgcaaggcgttgtaggtaactcttctagtggcctcattgcaactagccagcaggttaacaaagaaatatatggtgatggtgttagtgccgaccccgttactcgtgctggtttgaaaacgacaacccgcaacctgttcactcaggtaggagataactccgaaggtaacgaaacgggcatttatgcactgattgccgaccttaataaacgtgttgaggatttagaagcgttgaacattgcacaggcacttgcagatcgcgtaactatcgaagatctgaatgctaaactggctatgtatatcaaagaagctgatgccgatctccgttatgagagcaaaaacccgcctctgtcattcggtactaacctaactggtgatactgaatacactactggcgatccattgtctctaagcgtaactatgaatggtggtgtttctccgctgtcttaccagtggacgaaaaacggcgtaaacgttggtactgatgctaacacatttaccatcgattcgctacagccttctgattccggaacttacaaagtaacggtaactgatgcaagccataaagtcatcgtttctgatgaactggcgatcactgtcgcttaacgattaacaaggggcttcggccccttttgaggatctttatgattacgaacaacccagcacaattaaaagatgaaattctgcgccgtttaggtgctccgatcgtcaaaatcgaagtgacaaccgaacaggtttatgactgcattcaacgagcattagacctatatgcagaatatcattacaatggatctaacaaagggtatatcattctcaccctggggccggataacccgaaaaatattttcgatctgagtaaagaacatattttcgcaattactaaagtgttgcgtactaacatgggttcccttgtatcgatggatggtactgcggtttatccgtggtttactgatttcctgatgggccttactggtggttctctgggcggtggtggttgtgcatcacgtacctacggaatgaacgcatacggcgcggatatgggctattttacccagatgatgagctatcagcggtcaatgcaagatctcctgtctccgcttccggattactggtataacgacgacacaggacagtttgcagtatacggaaccgttaaagatggtgatattgttgttatcgaagcaatgatcagatcctttgttgatgtacccagtatggtcggtaacgtctctggatacgctacagcgggttctgatggcgaagataagccaactatagcagatatatacaataacccctacaaagccgtctcaggcggtgtgaaggctggtcaaggtacaagcgttcagggttcatcctctgcgtataacaaccgttgggtgaaagattacgcaactgctcttgttaaagaggtaaacggtcaggtgctggctaagtttcagggtatgcaattacctggtggtgttgctccggatggaacccgactgattcaggaagctatgcaagaaaaagaaaacctccgtcaagaacttctgttactgtctgatgcacttccagtgttgatgatgtaagggggaaaaatgcaatttagattatatctagtagagtttaaaacttctacgggaataaaaatatatggaggtaaacgccattctccatttaatgatcctagacatgattgttattgcggatctggggtatacatcaaacgagcattaaaaaaatatggaagagaatgtattgttaatatacaatggtcaaaaccgtttccaaacaaggatttattagcggaagccgaagaattacttgttgatgagttgatagcatcttatgataattgtgttaatttagttcgtggcggtaaaggaggtgcttctttttataatccagcagataaccctaattttggttctaaacgatctattgaatctaaaataaagatgtcagaaaaggcaaaaaatagggtttatagcgaggaaggactaaaacgaagacaggaagccactagggtcatgattcaacacagaaagcctcgtgatgtttctggaagcaaaaacccagccgcacgaagggtaattgtggatggagtagaatactcaacattgaaagaatgtggagatcattacgggataactaaaaactccgtctttagtcgaataaaatctaagaaatgggagggatggaattatgcgtgattgggatgataatttattcgcacagttggaatctggcgaaggtgttgataatagtttaaaaacggaagttactaacaaatacgttaactggtacaagtataaccctactcaacagttacatgattcactaacagccgaagcaattcaaatgaaatctccggatatgtattacgtccgtcgagaatttgttaatattgataaaattttgggtgaagaccgtgaatcgaagtttacaaaatcgtggaaaattgcagcatacatcgattcgtatgcaaactacgaagggcagagagatttttacagtaaattcggtatgatgtcaaacgatgaaatgacacttgtgatcaatcctcgtttatttgcacatcaaactgatggcgggatccctgttctgggagatttgatttatttccctatggataacagcctgtttgaaattacatggattgagtttgacccgttcttccagttcggcgatcgtcctcaacgtaaaatcaacctcgttaaatttatctatactggcgaagaattggatcctaaactgcaacgaaatgaagggattaaccttgctcccgatgctgatttggatctcgaacctattcgaaatcttgatgggttggcggataccaatattgaacaatacgaagaagatcaagcctttgaagatgaaggtgatgaattcattgaatcgtttgatgttgttaacgggcgcggatcaccgttcgcacagttcccataaatataaccaggggaaaccctatacatgtagggtataggagaaatcttatacccgctttaacccatacaggaaaaagaaaatgtttggctactggtataatagttcgctgcgaaattatattgtcttgatgggttgtcttttcaatcacgtgcaagttaaacgcattcgcggcgaacaagaaaaatttatcaaggttccgattacctacgcatcaaaagaaaaattcctggcatccatgaacaagctgaactatgcatacagtcaggaaaatgttgctaaaacggaaacaattttaccgcgtatgaatctatccctcgttgatttgcagtataacgcaattcgtaaaactgggatcgcggtaaaccaaaaaatgacgcagttacgcgcacctggaaaaacagtaacgcagtttaaccctgctccgtatcgtctcatgttcgaactgggagtgtatacccgttacgaagatgatgtgtttcagattatcgaacaaatactgccatatttccagccgcatttcaactgtcgtattacagaattacataaaaacgacattaaaatagaccgagatattaaaatatctctgcaatctgtttcccctgatacatcgtttgaaggcgatgcaacgacacggcgacacattgaatggtctttaatgtttgaattacagggctacctgtatccgcctgttaacgagattaaaggcgagatcagaacagtatacacggatttcttttccaatatgaacccgttggacaaagacaatttcgaatccgttgatgctcaggtggatccggctgatatgcctatacaggattacacgggagaagaatacattcaaacgtatgctaatgatatcccaattcctagcggtgatcaacctcctaaaccgaggggccaataatggaagaatttagcgtaaaacaactacttgatcttgaaaatctccctggtgctgaaactggggaagaaatggttgtatatgaaaaactcgaactcgttgatgtcgagtcacacccagcagatcgaaaacctgatttagaggaagactatgcacttgcgcgtaaaaccgcgcattacatgaatcagatgatcatggatatggcacaaattgccttgcataacgctaaaaactctgaatctccgagacacgttgaagtttttacaaccctgatgaatcagttaaacaattctaaccagggattgatgaaaattcataaagaaatgcgagaaattaccgaagaaacaacaaaaccaggatctgaaaaaggtaatggcggcggtaatgaaatgaacatagagaatgcaactgtatttgttggttcccctacggaattaatgcagaaatatggtagtgcatacgaaccaaaagaaggcttcattaatggtgaagcggtagaggtaaaccctgatggaaatggaaccgacgatcgatccgagtaaggaatcagatcacccaatcggattaatgcatcccgattatctgaaaaagaaaattgatgaatttgggatggagtggacgcaaagcgaacatgataaaaaatggtatccgacaaagtttagcgattacctaaaaattaacggtatccataaagttgatattcaagcaaaagacagttcaaactttgcgacgtataaaaacaaaggaaacaagaaaactcgatataacggaaacccaaacctgaaacgcgcgtacatccaaacgaaatggacgcaacagatgttgatggagtgggttaaatgtcgtgatgatattgtttattttgctgaaacatattgcgcgatcacccacattgactatggtacaattaaggttcagttgcgtgactatcagcgcgaaatgctgatcgaaatgcataaaaaccgtatggttgcctgtaacctgtctcgccagttgggtaaaacaaccgttgttgctatcttccttgcacactttgtgtgtttcaacgaggataaatatgttggcgttttggctcataaagcctctatgtctgcggaagttctggatcgtacaaaacaggcgattgaacttctccccgatttcttgcaacctggtatcgttgaatggaacaaaggttctattgaacttgataacaaatgtaaaattggtgcgtttgcatcttctcccgatgcggtgcgtggtaactccttcgcaatgatctacattgacgaatgtgcgtttattccaaactttattgatgcgtggttagcgattcagccagtaatttcttctggtcgtaaatcgaaaatccttatcacaacgacacctaacgggcttaaccacttctatgatatctggaacgctgctatagaaggaaaatccggcttcgtaccatacacggcgatctggacatcggttaaagagcgtttgtatacagacggtgatgatggcgtatttgatgacggctattcatggtcttcgaagatgatcgccagttcaagtaaagaagcatttttacaggaacattgtgctgaattcatgggaaccaacggaaccctgatcgctggctggaaattgtcaaaactctcatgggttgatactgatgaaacggaaactaatttttatcagtataaagctcctgtagagggacataaatatattgcggtactcgacccagccgaagggcgcggtcaggactatcacgcgatgcatattatagatattacatctatgccgtttgaacaggttgctgtatatcattcaaacaaaacatcgcaccttattttgcctgatgtcctgttacgttatcttatgatgtacaacgaagcatgggtttatatcgagctaaatagcacaggccactcagtggctaaatctttgttttctgagttggattacgataacgttatttgtgatagctataatgatttggggatgaaacaaagtaaacgatcgaaagcgattggatgctcaaccctaaaagacttgatagagaaagataaactcatcataaataacaaaaagacaatacttgaatttcgtactttctcagaaaaaggtgtttcgtgggctgcggaagaaggtttccatgacgatctcgttatggcgctggtttgctttgcatggctaacaacacaaatgaaattcgcagaattttgcgagaaagacgatttgcggttggcaaatgaggtattcgcacgtgagcgcgaactgctttatgaagatatgttatgtcctgttatcgtaacgagtggcgacgaaacaatatctgtcggccaacacggtatttcgtttatataaatttagaggaaacttaataatggctttaatctctccaggcattgaaactaaagaaacatcggtacaatctaccgttgttcgaaattcaactggtcgtgctgctattgttggtaaattttcatgggggccagcttaccagatccgtcagatttctaacgaagtcgaactggtaaactattttggctccccagacaatgacaccgctgattatttcatgaacgctgtaaactttttacagttcggtcaggatctgcgtgttgttcgtgtcgtcgataaagaagccgcaaaaaacgcaaccgcgatctataatcagatcaaaaccacgatcaccgctgctggttctaactatgcagtagacgatcagatcaaagttaaacacaataacgttgttattgaagaagatggtgttgttaccagcgttgatgatcagggtaaagtcctgtctgtgttcattccgagcactaagatcatcgcacacgctaaacaggttggtgtatatccggatctgtctagtggctggactacagaaatcgtttccagttcttctggtgtttctgctacgattacaatcgacggcgtagaagttgatccgggtattactctgctcaaccttgacaccgcaaaagaaactattcaggcaactgctttccagaaactttgcaccaaatacaagctaccgtctgttattgcaatttatcctggcgaaatgggtagcaccgtaacggttgaaattctgtctaaagctgcatacgattcttcggctgtcattaagtcttatccttctggtaagtctggtaaaaacagcggtcgcagttcgatgaactttggccctcagaatgataaccaatacgcgtttatcgttcgccgtggtggtattatccaagaaacgtttatcgtgtcaaccgctaaaggtgataaagatatctacggttcaacgatctacatggatgatttctttgcaaacggtggttctcagtatctgtatggtacgtccctaaactggcctgtcggattctccggcgttctggaactgggcggcggtacttctgcaaacgccactgtaggcgctgatgaactcatggctggttgggatatgttcgcagatcgtgaatctctgcatgttcctctgctgattgcgggtgcttgtgctggcgaaactgccgaaatttcgtctactgtacagaaacacgctgtgtctatcggtgaaacccgttcagattgcgtcgtattcgtttctccgccgcgttctgctctggttaatatcccactggctcaggccgttgataacctcgtagaatggcgtacaggctacaaaatcggtaatactaccccagttgataacaacatgaacgtaagttcaagttatgcgttcatcgacggtaactataagttccagtatgataaatacaacgatgttaaccgttggatcccgctcgcgggtgatatggctggcctctgtgtttataccgatcaggtatcgcaaccgtggatgtctccggctggctacaaccgtggtcaactgcgtaactgcatcaaactggctatcgaaccgactaacgcgcatcgcgattctatgtaccaggtacagattaacgcggttactggtttctctggtggcgctggatacattctgtacggtgataaaactgcaactactgttccaagcccgtttgaccgtatcaacgttcgtcgcttgttcaacatgatcaagaaagacatcggcgataacgcgaaatataaactgttcgagaataacgatgatttcactcgttcttccttccgtatggatgcaggacagtatatgtctaacgttcgcgctctgggcggtgtatacgattaccgtgtggtttgtgacactacgaacaacacgccggatgttattgatcgcaatgagtttattgcatcaatctacgtcaaaccagcacgttctatcaactacatcacgctgaacttcgtagcaacctcaactggtgcggatttcgatgagttgattggatcaacgtcagtataacatgtaaggggctgaaaagcccctataaatacacatagaggttagaaaatgcttactgatattgtacgcgcctttgaatccggtgatttcgcacgtccgaacctgttcgaagtagagatcccgtacctgggcaaaaactttaaattaaaatgtaaagccgctactatgccagcgtctaccgttgaaaaagttccggtaggttacatgaaccgcaaaattaacgttgctggtgaccgtacctatgatgactggacaatcacggtatataacgacgatgcacacacaacccgtgatgcaatcgtagcatggtcaaacatgctgcatggtatgggtgaagacattacaggggatatccctgcaaactacaaaaaaaccgctacggttaaacagaaaaaccgtaacgacgaagtaaccgccgaacataccatttatggcctgttcccgaccaacgttggtgaggttactttagactgggatagcaacaacgaagtgagcacttttgagtgtactttcgcgctagactggtgggtttaaacgctataaatacaggggtagcaataccccttatcattatttttcggagttgtaaatgaacttttttggattagacaatgtgttagggtttttcaaaaatttcgccaaacaggatgaaatggaatttgaagcccaattaaaagatgatacaggttcgattgcgcctccgaaaaataacgatggggcgcacgaaatcgaaacggacttatcaaaccagcgttattcttctgtgttccaacagttctattccggacaggatccgcgaattcagaacaaaacacagctaataaatacataccgtggtatcatgacatacccggaagtggaaaacgctgtttctgaaatcattaacgaagctattgttaatgaacaaggaaaagatattgttacgatggatcttactaaaacgaattttagtaaaaatatccaagataagatcatggaagaactcgataccgtaatgaatattcacgatttcgataaccgaggctctcgtttattccgtgattggtatgttgattcgcgtatctatttccataaaatcatgcacaaaaatgaagctgacggcatcaaagaattacgccagttagatccccgttgcatggaactgatccgagaatcggttacagaaaccctacccggtggggttaaaattttccgtggctatcgtgaatacttcgtatacaccgcaccgaaaaacggttatagctacaacggacagatttatagtcacaatgacaaggtaaaaattcctcgctctgcgattgtttacgctcatagcggccttgaggattgcgacaacaacattataggctacctgcaccgcgcggtcaagccagctaaccagttgcgtttgctggaagatgctatggtgatttaccgtattacccgtgcgcctgaacgtcgtgtgttctatatcgacgtaggtcagatgggtggccctaaagctacacagtacgtaaataacattgcacagggcttaaaaaaccgtgttgtatatgacgcgagcactggtaaagttaagaatcagcaaaataacctgtcaatgacagaggactattggctgatgcgtcgtgatggtaaagcagttaccgaagtttcaacgcttcctggtggcactgccttctctgatatcgacgatgttaaatggtttaaccgtaagctgtatgaagcgttacgtattccgttaagccgtatgcctcgcgatgatggcggtatccagttgggtaacgatggcggtattacccgcgacgaattgaactttagcaaatttattcgcgaattgcaaattcaattcaaccctgttcttgcggatccgttaaaaactaacttgatcgcgaagaaaatcattacagaagatgaatgggatgaaaacgtaagtaagattgcttttgtatatcagcaagattcttactattccgaaatcaaagatattgagattttggaacgccgtttaaacctgatgggccaacttgaaggggtggtcggcaaatatatctcccataaatacgtaatgaaagaagttctccggatgtctgatgaggaaattcaaagcgaagccaaacagatagaagaagaatcaaaagaagaacgttttaaaaatccagaagcggaagaggaaaacttttgatgaaagaatttatcgaagcaatcaaaagcggtaatctggtggaagctaaaaaaactttttactccatcatggaagaccgcacagaagcgcttcgtcacgaattacgcgttgaacttgccgaagctgtacgcatcgaaggcgaagaagacaaagaaaaagacgacgaaggcgctgataaagatgacgaaaagggcgataaaaagccagccgaggatgataaatccgataaagatgatgagtgaggtgtgtaatgcaacttgacatcgaaatcaccgccgaagatctccatgaacatttagacgaagcgaaagctcgtgtagatattctgggtatcgatgaaggcacggttaaaatcatcgaaaatttggcggtcaccgaaccaaatttagcccttgctatgatggcggttgttgaaggtttaacacttgatgaggtaattgtcaagcatgttgattcccgtggcaacgtagaacgcctcaaagacaggaaaacccgtgagcgtaatgcgtatcagacgaccggattaactaaatcccaacgtcgccagatcgcgcgtcgtgctctcaaaacaaaacgtgctaacccgtcaattgctactcgcgcacaacgtaagcgcaagaaagcattgcgtaaacgtgctgcactggggctataaatatgaatgaatcccaaatcaacgaaaacggcgatatgcttttaatcgaagaatggggtttaccttgcggtgacgtttcagaatctattttagaatctgttggggaatcaaaagacggtaaattacggatcgaaggtattttccttcaagccgaaaaggttaaccgtaaccgtcgtttgtatcctaaaaacgtacttgaagaagcagttaacgattatattagaactcaagttaacacccgtcaagcattaggtgaaatgaatcaccctccgcgtccgaatgtggatccgcgaaatgcttgcatcctgattgaaaaattgtggtggaagggtaacgatgtttggggccgcgctgttgttgttgaaggcgacggtggtgatggtgacaaactggcggcgttgattcgtgctggttgggttcctggtgtttcttcccgtggattaggtaagctctccgattccggcaaaggctacggcgttgtacaaaagggctttaaattagctgtaggcgttgatgtcgtctgggggccaagcgcacctgatgcatatgttaagcctatagtggaaaatcagcaaagcaaaccgcttgttgagaataatagtgctgatgacgcttttctggcattgtccgagcgtttgaaaggtctataaatacattaaacaaaacaacaggaaaatcaaaaatgcttaaagaacaactgctggcggaagcccagaacctggatactccggtcgagttagacagcattttcgaatcagttgaactttctgatgacgtgaaagcgacattcaccactgtattcgaacaagctgtaaaagctggcgctgcaaaactcgctgaatcccacattacccagatcgcggaacgttccgacgaactggtcgaagctcaggtaactgaacgtgccgctgaaatcgaaactaagctgtacgaagatgctgataaatattttgcgcacatttccgaagaatggctgaaagaaaacaaagaagccgtttcccgtgacatcaaagcagatctgtttgaatccctgatcatgggcctcaaagaagttctggttgaacataacgttgtcattccggaagaacaggttgatgtagtcgccgaactggaagacgaactgactgagaatcagcaggaagttaaaaccctgtttgaagcaaatcaggaactgaccaaagaaatttcagaaatgaaacgcaatgcagtagtttcagagaaaactaaaggtttgaccgaatctcaggtcgaaaaagtagaatctctgattgaagggctggaatattccgcaaccttcgaaaataaactcagcgcaattgttgaaatggtagcaaccaaagctgaaaaacccgttgacgagtctgtaaatactccgcaaacgaaagatgactttgttccggtagtcgaaagtgttccggcagagaaatccaagatcaataaatatgtacaagcggcaaaagccctttcttaatttcaaaaggtaagaaacaatgtctaagaaaaacgaattgatggaaaaatggaacgatcttctggagtctcaggaaggcttaccggatatcgctaccaaatccaaaaaacaactgattgctgccattatggaagcacaggaaaaagacgcagaagttgatccggtttaccgcgacgagaaaatcgttgaatccttcggtggtttcctggcggaagctgaaattgctggtgaccacggttacgacgcaaccaaaatcgcttctggtaactcaagcggtgctatcaccaacatcggccctgctgtaatcggtatggttcgccgtgcgattcctaacctgatcgcgttcgatatctgcggtgttcagcctatgactggccctactggtcaggtgttcgctctccgcgcagtgtacggcaaagatccgctggcttccggtgctaaagaagcattccatccgatgttctctccggatagcatgtactccggtcagggcgcggctccgagcaacggctttaccgaactggcttccggtactgcgatcgctgacggtgctatcgtgttccacgatttcggtgaaactggtcgtgtgttcctccagaacgtttctggcgctccggttactgtaactggttctaccgacgatgctctggatgctgctgttatcgccgaacaggaaaaaggtactctggctgaaatttcttacggtatggctaccagtgtagcagaactgcaagaacagttcaacggttctactagcaacccgtggaacgaaatgggcttccgtatcgataagcaggttatcgaagcacgtagccgccaactgaaagcacagtactctgtagaactggctcaggatctccgcgctgttcacggtatggacgctgacgccgaactgtctgctattctggcaaccgaaatcatgctggaaatcaaccgcgaaatcgttgatatgatcaactataccgcacaggttggtaaaactggtttcactcagaccgttggctctaaagctggtgcgtttgacttccaggatccgattgatgttcgtggtgctcgttgggctggtgaaagctacaaagctctgctgattcagatcgacaaagaagcaaacgaaatcgcacgtcaaactggtcgtggtgctggtaacttcatcatcgcttcccgtaacgtggtttccgctctggctcgtatcgatagcggtatcactccggcaggtcaaggtctccagaagactctgaacgttgacaccactaaagcagtattcgctggtgttctgggtggcgtgtataaagtatacatcgaccagtatgcacgtggtgattacttcaccgtgggttacaaaggcgataacgaaatggatgctggtatctactacgctccgtatgttgcgctgaccccgctgcgtggttctgatccgaagaacttccagccagtaatgggcttcaaaactcgttacggtgtaggtatcaacccgtttgcgaactctcgctctcaggctccgtccgaccgtatcacttctggtatgattaccaaagaaatgttcggtaaaaacgcatacttccgcaaggtttatgtgaaaggactttgatcctaagttattgaaaaataacgatattaaagggaaccttcgggttccctttttcatttctataaatagtgaaaacaattgaggctatattatgaaacatattatctacaaaataacaaatttggttaataataaaatttacgttggtgctcattcaacagaagacatcaatgattcatacatgggttcagggattgcggttaaaaaagcacaaaagaaatatggaatgaataactttgtaaaagaaatattacatgttttcgatacccgtgaagaaatgtatgaaaaagaaagagagatcgtcaatctcgaattcataaatcgtccagatacgtataatgctggcataggtggtaaaggtgctcctatgtcattgattggttggtctgacgaacaaaggaaaaagatttctgaaaatactgcaaaggctatgcgaacaccagaactaagggagaagatgagacaatcccgtttaggtaaaccacagtccgaagaatccaacagaaagcgctcagagacgttaaaagctaaatatatgaatggacgtatagacagagagtataaacctctcacagaagcgcacaaggccaaattaggccgttctgtatccatagatggagttgtatactcatccggatcagcggcagcgaaatcccttagtatgtcccactctggtttaaaatatcggattaatagcgacaaataccctacctggaaatttgttgcataaataccattatacactttacgcaggaacataaaatgagtgaaaaattttacacaattaacaagctggtgcgtcagtcacagctaccgcctggcctgtctaaaaaggttcttgatgaggcaaccggaacagaaacaattaacgtagctaatacccgtccggatctggtatctcttacccgtgcggtaaacaacctgatctacggtgaacttgtagcaattcaggaaactaatttgcctaccgcaaccctgttcggtgtgcgttatcgtaaccctaaaggcgatatgacgttttccagcgctgctacctattccggtaagtatgcaagccgtgataacattccagttggtgcggttggtactgcctataccaaaggccaagtttttaaacatccgacaagcgatgtcgtatacgaagcaactgatagcgtaactctcgcaggtgctgatattaatgaagcgattatggtcgcattattcagcaataaattacgcctggcaagcgaagccgcgccaacaagtcagtatgaaaccagcgaagatattagtacaacttctttcgaaatggatcgttggaatatcaacgttcgttcccgtaaattcaaaactgaaatgaccgtggaacttatgcaggatctggaagcaaaccaattcaacgcagaaaatgtgattgaagatgttttgggtactgttgccagtgaagaagtaaacaaagatatcattcagactctgatcaacgtatcaaatcgttacaacgttgatggtgtggtaacaaatggcattttcgatgctacaaccgcatacactgcaaaggatgctccggctttaggtcgtttcctgtatcaattagtgtgtgaaatggggcaggaaatgaatagaacgacttcatttgaagctacctatgtcctggcctcttctcgcgttgtaggcgttctggctgcgtctggttggatgcatgaaaccgatgaaacccacccgttagcgacagggcgacttaaaaacggttattatgtctatactgacaccaatacaccgtttgattacctgctgactggttgcaagtacgatctgggtgaaatggatcatgttggctctctgttctatacgccatacacagaagctgatcaggcaggttcgatcaagatttctgttgatcctcaatccttacagcctaaagttgctattctgatgcgctacggtttatcggttaacccatataccactgctgcaaacgaaagacttgtgaaaggtgatgactgggtaaacctctcaggtaaatctaagatgagtcagattgtgggtatcaaacttcctaaactgggttgatagtataacccaacggggataatattcaataggtggagtagggaaacttactccaccttttaataattataattaatattaaatcttgaatttataaatgatttatgataaaatttattaattataattattatagatcaaataatttttgaaatcaagtaaaaataaatttgattttataaattagatcatgtataattattcttttaataatatattatattagatcaatttaaatttgactactaattaatatagtatattatagatcaactgggtaaattggtgagtatgttatgagtttgaaattagaagatctgcaaaatgaacttgaaaaggatatgctgatagatcccctcaagttgcaatcagaatcagcggatatcccgaagatttgggctaaatggcttcgataccattcaaacgctaagaaaaaattgatccaacttcatgcgaaaaaagaagctgatgtgaaggatcgtatgttgtactacaccggaaggcatgacaaagaaatgtgcgaagtggtgtatactgggactactgaaattaaaatcgcgatcgctggggatccgaaaattgtagaaaccaacaagctgatccagtattatgacatggtggtagatttcaccagcaaagcactggatatcgtcaaaaacaaaggatactctatcaaaaacatgttagagatccgtaaattagaaagtggtgcataatgtctactgaaaatgaaaaatgtgtagtgtgcaagtgtccggttccttctactggttttgtgactgaatccgggcgcgtgtgtagtactatctgtgctgactacatcgcagaaaaaacaaaaaacggcgagatcaacgaatccgatgatctgaatgaagttcaaatgttgctgtaggagaatcttatgattggttacggtgaaggaattacagatcgtgatgaacgtccggatctgttagaatctgacgaacatcctgatttttaggataggtaaaactatgccataggcatgacaaaccgattatgcgtaatgaatgaggcttgtacggggttctttgcctggatcccatagttccccattacggaggcaaaacgggcgatggaggcaacaaaatcgcgtcctaaatacatgtgtacccgaaaggggcttgataaaagaatgctggatgataggcgtactcttttgcgccgtccgatggagtttaccttcggcggggtgattgataatataccttcgatcaagggcatgagtaaaaaaagccagaatagtacctcactggctataatcaaatgtacgtgttgggctgattgcgtcccaaaattaaaagccccttcctttcggttggggctttttttagaacttttcttcttctccgctttcgagttcggcctttaattcttcggctcgacctttcagcgcatcgcgcatagaaatatcgtctgacggcgcaacatcaacttcttttacacgatttttgtaatatttttcaagctctttaaggccgtccatagtacggcaagaggcgaccttgctcatgaaatcatcaatagccgcctcataaagtcgaaaatcgttgaaactcttcattttgacctctaaatttcgatttgtttgatcacgtagtcaaacttttcttcattgtaaatgcgtactcgttcgattgcgtgtttcataccatagtttttgtatgaatatttatttttagcatttttggactttgccagcgttgctaagttatcaaccaaatcccaaacagtagcaagagatttagaatcatgtttacgcagtacgcgcccaattgactgtttgactataacagcagatttgcaaggatgtccgaagatgatgtgatgcaggttcttgacagaaatacctgtactcagtacaccaatagaaccgattacgatcagtcccttcgttgattccgcgatccgtttcatttcgtttcgctcatcaatccccgtttccccagaaatgtatacaacgttgtcatatacctttttgagttgctcatacagccatttaccatgtttgatctgattgaacatcacaaacacgttttcatctttttcccttgccagtttcaacgccagcttacagatccatgcgttacgcctggtatgcgatgttatatacttgatttcgctttggtaatcagcccccttcattttcttaatctcatcctctttatatctcatgaagatggtattaattcgaaggttggtaacttgaccttcctgcatcaaccgatttgtatcaactggcttgaagatttgaccaaaagcgccaatgtattgcatcatgtttgctttgccttctttcagagaaccagaaaggccaaacttgaaaatacactgatccattgtgttgatgatcttctgtatgctttgtccggttgatttgtggcattcatccaccatcaaacacatgaactgctgaaaccactcaggaggcattttaacagccgattgccacgtagacacgtagatcaatgcattactgtttttagcagttcctgaacgtattccaagcattgcctcgcgaggtaaaaggcgatagttgacgatatcaccgatcatctgatcaacaagggcagttgttgggacaatgattagtactttgcctgtgtaattttccagacaccaacgagatatcaatccctgaataagagatttacccgctgacgttgggaggttaagcacagcacggcggtttttaatcgcatgaaacaccgattgtttttgataccaatacggatcaatttgcttgtttccgtcgtatactgggtgttcttctaaccacttgtcaaaatctggctgggtaatttcttctgtttcgtggatcttaggatccatccagatagaatacccgcgagactccgcgaattttgttacaagataggctaaaccgtagggcagtttcccgttatagtccatcaagtatatgtagccgttccatccaccatatttgtattttgcctggtactgataacctggcggctggaagctgaaatagtcgcgcaattcatagactatgttagcctctgcctgaatctgcacatgactagtgttaaggaatttgacttcgatatccactatgtgtatcctatatacggtttatatgaatatttataggctaaataatgataaacattggagaactacaatgagtattgattacgaaaaggttgaaggtttcaaagccttagaacaaaaagaagccaaattacagcttgctacctacgcgcaagaaacgtttgatgtcaaactgaaccgtcagaagtcattcgaaaatatgcttgctgatctggaagctgccgtaccggaagaaaaaccggaactgttgatcgactcccctgatccggaaattgttacatacgaaggtgaaccatctgttcctgatgttgctccggaaattaccgaccagattgaaattgttcccgacgctctacaagctcctacaagcgattctgagacggtttctgatgaactggcatggatggaagggtttaccccgtctatcatcatgatgggccgctctgtttcgaatactggcttttatacgtgtccgtattggatctatgattggatgaaacaaaatccggattggtataagcaccctgatggttgtcctcattattcagcgcgtcaaaccctcaagtcactggcatggtacatgcaccgtgatgggatggttactgtacgcgaaaccagaaatagccagttcgacacgttcaaaaaataattttaaaaagtagttgaccttaccctgctgttcgagtatatttgtattcgaaggcgggggaatggctctcgcagtgaagaaggaaatacaaaatgaacatgatgaaaaatgcttactacccagttctgtttgtttggactaatggtgaagttaagaaaatcgtcaattctaaagctccttattacactgtaggtgaagcacttcgccacgctgcggaagcaaattatcctgttcatgccgaacctggttatgctcgttggaacggttctaaatgggttgctgatacctgggacaactacgaagaagaaagaatggagtgtgatcctgattacgtatctcgtcaaatggaagctcatatgattgcagatcgtagactggataatgaagctcgcggattctattgattaacaaggggctacggccccttttcttttaggtgaaatatgaacttaaatcacgaatgtttaaaagatttgagcgatggtaacgagattggtaacgttatttttcttgatatcgatggcgttctaaataatatgcggtgcatgaaatttggtgaacatatggacatcgaatgcgcacgacacttacgccggatagtgaatcacgctaattgtgatatcgtcatttcctctacgtggagaatcggcaacagtacccataatctacgtgaaatattttatccgtggggattgtatcggatcattggtaaaacttgcactaacttccctcatagtactggaatgcgtggtgatgaaatcaaggcatggatcgatactttcggatgtaaaaactatctcattcttgatgatgataccgatatgctttcttcacaaaaagaacattttattaaaactgatgggtttgttgggttgaccgaagaacaatccacttatgcgatccgtaacattttcggggttactactccgttttgtcctgaatgcaatgggtatggacgtgttaacggctacgacaaatgcggaacgtgtaacggtaaaatactccggctataaataccaataaacataagaggctaaatttatggcaattccttctgtaacaattagcgccaacaaaaacgaacttttgattggcgaaactttgaccttagaggttgaaactactgaactagatccgggtgatgtgtttctggcctatcgttggcaaaaagacggtgtagatattccaggcgcaaccgccgatacttacacaactacggttgacggtacaactgctggtgattataccctgatcttaaaacacggtgctgatgaagaatcagcaacagaaaccacgtctgatacaatcaccgtgaccacttattctgatgatcttgtttctaaatggacggttcacccgattccgtggcgtgataccagctttaccccgatcggttattgggtacttgatgaaattctgtatcaaaaagcacagggtaaagattggaaaactgattatgctgattacaagtatagtgaggaagtacaaacgatcctgaaagcgttcatggaaaacggtgaatgtgagatccaggattcacgaaacggctatattcataaaatgagtgaaatctaagaggctttaaatggcaactgaaaaatggactacggttcatcctattccgtggagaaataccagttttacatatcttccatactggctatacgatattatcgttgatgcttttgagaaaggcgacgactggcgcgattatgcggaagaaaaatataaattagagtttgatactctgaaagaggcgtttgaagattatggtgatattcatgtaatcgaatctcgtaatggtaaactggttagtctgttgtcattgactcctgctcctgaaccagatcctgaccaataaaataaggcaaacaatgaatacacttctttttgatttcgacgacactttagcagaattttctcagactttttatgataagttcggtgtacgtccggaaggaacgccaaaagaacgatatgacgaaatggcggcttctttggtgcgtactgatttttataaaaaccttccccgtattcaggctgggattgacctccttcaatggagtttccaacgccgaatcggtgatcctgctactttgctgcttcgcgcggaagcggtcagccctctttgggttatgaaagaaaaactgaactatacagataagatttgcgctgaactggggatccatcgtctcgattttagtcgcattgactatccggaacagttcgcagaacatgcctatcgtggtgttctgatttcccgcaaccagaaacatcttgaaatctggaacaattctcatctagctaataaagttcctggtattttccttgcggaaaccctggaagaaaatattcagctagtcacggaagcgcttgcaaaggctaatcaataacaaaaaagggaaccgcaatggttccctttcttttacaatctttttaattcatcaagcgctgttttcttatcaccaacaaagaggattgctttacctcctgcttttctgaaaggcaacaccgcttttgcccgatcgtcaaacagaattcctttaccagcgaatgctgctttttcatggctacttttaacgtagtggaattctggaacgtaacccaatactttttgcaatgctttacgtttttgttcggcaacaccgtcagaattgaatttaccaacactggttagtattgctacatcaccaagtgttcttaaatgatggaataattcaaatccttctttgattggttccagattttcgtagaaatcagttttggcaatttttgctttgcactttttcaactcatcttctgtcatcatagagggttcgccatacattggcacaaatgaaccttcccagtcgaacaatacaccatccatatcaaagaaaaacttattcatatcaattcctcagtttgtgtatgcatactataatgtttaatcattaatgtcaaccccaagtgtcagttttcggtgcgtatgctgcaactttagccacaatttccttatccagttcagctacagatttctgaggcttaccacgggctttaactttgatgtagtttgacttaacaacaaacatccctttgttacttgatttcttgatctcgctatcaacaccaactttgttaaagctgatccaaatgtcgccgtccatatactgtttaagagaatcacccatgttcaggatcttcgccatagtaagggccgcgccttcgtgggtatccatgagaatttctttaggaactacacgatcgcgtttctggttctgctgcatagcaatatgcacatcgttcataacccatacgatatgtacgttttcttttttgtatcccagcgtttcgacatcacgcgcgatgcttgccagcttgctcatgccttttaacgttacgtcaaagatgaggttaggtttacgatcttctggtgctgccataataccggaataaacacggttttggtttttgttggaaatgttgaaaacgtcggcgatcacatgatggagggtagatacgttttctgggtttttgaggttcattgttttgacatcatgacccgtttgtttcttgatctctgctgcgagtttatcgctacccattacaagttttttcagggcgtcaacgtccagggtaataccttcgatgcctagcagtttttccagtgtgaatcctttaccggaaccagcaccgccagcaagaataacaacctgaccgaacttaggataagcacggcctccgaaggtgatcagcgcttcggttaaggtgctttctgtgaattgtttaaatgacttcatgtaaaattctccagtttattttctattatttattgacatgctttctgacagtggtgtatggttagggtgttcgacggataggccggaagaactttaaaccataaggtatatgatatgaaaatcaatttacatcgcttcattgtagaattttcccgcaaccgtgacatggactcttacaactattactcccgtgagattgaagatctttttgcggctcacgttggattccttcgccaccatacccctaaaatgcgtcctgaccacgatccgatatatagccctattacatggcaagcccctatcgatggttacgttgaagggatccggatcatgacgtttaacgcgatgtatggaaacgcgttgatccatatcgcacgtgagaaaagggccgaattccctaacggatggcgtattgatgaagtgattcaaaatcttatgcagttacgacgtgaatacaaagcgggtatgtgtctgcgtaatgaacagtatcagatgtataaaacgtatgcatatatctctaagcacctaattaattccatgttttacatcgttggtaatcatggttccgctatagatatcggttcttatgaaatcgtggcttatgctcgcgaacaaggaaaggccgctgcactgaaaatcattgaatctggtgctatcattcttaaccatcgcgttgatactattgcttactatggtgatcaggttgaggttgaaggcgtacaccatgaacgattcaacaaagccgtatttgctaaaaatggttatgcgtatggtaatgacattataacttctgcggttcctttcgttcgtctaactgttgaaggatttggagaaaggttgtcttatagactgtcagaagctcaaatgtgcgcggctgctgaaagaatagccagaaagcggaaaatgtataccgatgaatacctggcgtatgtcaacaaaacaaaagaagatgtagaccgagaaatttcttgcatggatttatccatttgatataatgtaagcatctttttaagggaggatacatgaaaacgatacattgcagaaatgaaaacgttgtttattatcacggttcgtgtactgctgctggtattgaaagcatgttattgcctccctgtgattctgatactctgtctgaaaaaggcagaaagaaaaatttagaccgtgttttctttaccgctgatatcgggttagctcgtatatatgctggaagggccgcacgttctataggtggggatcctgttctgtacagggttgtgtgtccggttgatgttgtatgcatgaacgaagacaaaggcgcgagcgtttaccatgcagcatgggcgttttgtgaggaattatgaatgataaagtgttggcgtatctcgttttcttgttgggatatcgcttagaagtgatgggcgcgtattcatcaatgtatggtgatttaacggctatctggatggtcgggttaggggttgcttttacattcctttcctttgcaattgttaatgaatcggaaaaggatattgtatgaaactatatcatgtgatctactctggtgttttaggcattgacaaacaaatgttagttgatgtaatgtgtaaaaaactcgatgaacgaattggaactcgatacaaaaatcatgtatcggaaagtattttcatcaacgttgaccatccaaatgacatggaagaaatggttaatactcttgatgatcagcagatcccgtttgttgacaatttcaacatgagcgctggagtgtatacggtagtaacttttgttctaaaaaatgttgacatccgaaacgatagcgtgttgaatgtagttgcaaaaatcgattctaccaaaggaaaataatatgaaaattgtacaccgtagcatttccgaactgtctcaagccgaaaaagtgcaaattcatttcaaattcaatgatttgcgtaaaggttatgccgaaattgcccgtgaacatgggttagataacggcgatatttaccaggtagtacaggaaattgaacgtatccgcgcgttccgttctgcaaatctccctgttaaaaatgcaatgcgccgcgaagcgatcgaaatccatcgtaagcgtgtgtacaatttagaacgtgctaaacgtccgatgaagaaagaaaagaaacctcgcccgtttaaacgcgaacatcttaacacctctatggcgctggcgtttcaagatgcggggattatctgatgcgtaaatctgcgatggatcgttgggctagtattgctacttcaaacgtaaaaccaaatcaagccgctcctgatgtagaagcggttcgtaaagcaaaagaacctgagattgtggcccttagccccgaactcattgagcatcgccgccgtgcgtctgctattgaactggatctgcgtattgcgcgttcatacaatctcaagcatgaacacgccgcaaagaacaaccattcttttgaccttactctggaagattggaaagtattgatgacaactgaacgttgtcagtattcaggcaagatgtttagcaataaacccggtagcccgtatgcccgtacaatggaacgtattaatccacgtctgggatatacacaagaaaatacaatagcggttatcaatgctgctaatgctgaaaaatcaaatctagatgcattcgttaagggtgatgtcattctggatgaagtaaaagtgaagttgctgcgtaaagcactttatcaagtcgaaaaacgtgtgaaaatgaaaggttaaattatgtttaagaaatattcttctcttactaaccattatgaaggtaagttcatcaatggtgtaattatgaacgggcttactggcggtgtgtgggttgcgcgtgaaaagatccacggtgctaactttagttttatcaccgatgacggaattaccgttacccccgcaaagcgtactgatgttgtgaagccagccgaagatttttatggctgttcagcagtagttgcaaagtattcaccagggatccgtaagatgtgggaaaccctcaaaaagaccggaacgtatgatgatttggttattcaagtctacggtgaatttgcggggcgcggtgtacagaaagatgttgattacggcgaaaaagatttctacgtattcgatatccgtgtaaatggtgaattccttccggataacctgtgctcgctgatctctcgatctcatggcctgaaaatggccccgctgttgggatacggtacttttgaagagatcaaagaactgccgatcacgtttgaatctgttgtgaataaagcaaatagcggcattggtagcgataatacagtatatggtgaattcgtatatcctatcatggacgttgaagagggcaacattgcagaaggttttgtaatgaaacctgtttcacctgcttttatgccaaacggtgaacgcgttgcaatcaaatgcaaaacaacaaaattcactgagaagaaagcgaagaaagcaacccgctttaatgctccggtttcactgtcagaaaaagacaaaaaccaactcgatgagtttgtttgttaccttacagagaaccgtgtgaaaaacgttctttcgaaactggatctggcttcgatcactgctaaagatttcggtcgcattatgggcttaactgttcaggatgctatcgaagaaatcagccgtaatcatgggcctttcctcgaacagttcgaagacccagcaatggctaaaaagctgtttgtaaccgaagcccaaaacatgattcgccctgtatggggcaaaatcctgaaccatgaattttaatcagattctggttgatgcaaaagcggctaccctgatcggtagccgtaaacctcctgaacgtatcgcaaacattgctgttaaaatcggacgtgctttgaacgaacgcgggatcagggcttattctggcggcgctcctggtatggatagtcactttctgtttgactatagtccggataacaggtgtataatccttcctgagaacggttttaacggccttttctcaaacggaaaggatatcatcgactttcaagatttaaacacacagaaagccgctgacgaagccagaaaggtagcgggtaacttcgatacacagaatgaatacgttcaaagaaggtatgcgcgaaacacgattcaagttcttcgtgaaaatcttgataatccaactgattttgttttattttgggcggaagaacgtgaaggatgtgttaaaggtggaaccgcgatcgctgtaagattggctaggttgtacagggttccatgtttcaatctcttcaaagaaagtgtattgaacgatgtgtgtgatacgttagggatcaatatcaaacccccaacgttggattttttatggtaattgaacatgcgcccttacttcgtgaaacatacgaaagatgggctgttaataacgcaataggtgaaaatatgattcatgtacgtagtatcggtactgacggagaaactccggtagaaggccgatctcccactctcgcagaacgagcaagagaaattatcaacgatcagaatgctaagatgatcgaacatgcgcgggatacaatcacaaaaggtgttttgaaacacgcgacaaaacaaaaccttatctatgatatgaagcatgatatcggctcttgtctgggtattgaatgtactcgctatgcattccaacgagtttctgaatggttggaagaagaagggctaaaattcgatacagaagaaaaacgcaacgccgctaagattacaaattctctggctagtaagtacaatcaaacgtatcgaaaccatgaagaacgtgaagtgttttctgaaaggaaaacggatcgccgtgtaagtgaattcactttttacattagttggtaaaaaggtgttgacgggggttggttatagtagtattctaactcccgtagacaagacactaactcagaaggataaacatcatggaaatcgtaatgaaagcaacttatgctggatactgcctggaagcaaaaggtgttgctaacaacggcaaaggcttacgggccaatgttgaagcaatgatggatgaattacatgcaatatacgaatacgacaacgtagcgggtagcgttcttatccaggcgttggaagttgatggtgttgattgtgctggttggtgggatgcttacattgactacaacgataaccgggtttacctgttgagcaacaaagattatttctaaggaaccactatgagcgatgaagctgaggctttagaagattgggctgattttgatgacgaagaagacggtgaatatttctgcgttaatcgtggtgcttataaagaccgtttagaactccgtaaacttttatcgggttcctctcaaatatcaggatccaaacgaaaaagtagtaaacaaaaagttcagtatagtgatggttctgtacgtgatgaaactgttgttgctgaattccgtggtcgggttatcacaaaagaaagacaaattgatgtaaagaacttgtatgaagtggctaaggctgctaaaataggttctgtgattgtttgccctgtgtgcaaagaaaaacacacaaagacaacgtatcacaaagttttctgttcgaatggcagaaaaaccagtaaggattgtaagtctaaatatcacaatacaatccatcccgaacgactggatcgggtattttaaaataaacctaaaacgtggagtacgtttatgaacaacaaaactttcgaagaactgaacagcatcatcacttccgtagattcctataaggtttctcactggtcgcaatatccaactggctccgaagaggcgctgttttatattgaatctcgtggtggtaaatttgatcaagtagttacggctggctgtaaccgccttgcgcaaatcctatcacgtccggtgactatggaaaacgtagattttgctaatcggttgtacaaaatgcactttgggcgcgaaatcttcaactacaaaggttggaaagaaattgctgaactgggttacatccctcttgaattcagagcgattccggaaggaactccagtagcggttaaaaatccggttgcaactttccacgctgggaaaaatgcgctgtggttagcaggacacgtagaaaccctggcgatcaggggagtatggttcccttcaaccgtagcaactctatcccgcgaatgtaaaaaagtgttgaagaaatatctcaagaaaacctctgatctcgaaggcgaagcatttgatatggtgttacgtacccgtttgcatgacttcggcgcacgtggaacttcttctgctgaatccgctggtattggtggcctcgcgcacctgtataacttcctcggtactgataccgtagaagcgctgattatggctatctctctgtttgaagattgtcagaaagcgtttgatgatggtgaaatggcggctggtatttcaattcctgctcgcgaacattccactaccgtttcttacggcaaagaaaacgaagaccttgcgtacaaaaacagtattgagatcttcggcgaagggatgtatgcatgtgtgtatgattcctgggattttaaagcggcggttcgccgtatcgcagaatataaagattcgattctttctaagggcggtactctggtagttcgtccggattctggtgatatggtagacaatatcatgtacgctcttgaagaactgggtcgtatctttggctatacagtgaactcaaaagggtataaagtactacacccagcagtaaggatcattcaaggcgatgaaattcatggccctgaaacaatcaatcgggtgttgaactggatggagtctaaccgttgggcgtctgaaaacatcgcgtttggtatgggcggcggattgcttcaagaagttacccgcgacactcaaaaatatgcgatgaaaatgtgcgcaatcaaaattaacggtgtgtggactggtgtgtataaatgtccaaaaggcgctgaatggaaaaagagtaaaaaagggttgttgatgactatcactgatggtgttaactttaaaaccattgatactctggaacagaaagtgccggaaggctggaaagatgctatgatcacatactatgtcaacggaaagattacttcccgtgacactttagaggaaattaggaaccgtgccgggatttagtatccgcaaaaacaacaaaggaaccgtgattttctatgacaacattccccttgtagctcgcaaggggctttttgctaaaatcgctgggtattcctttaaactggaagaagtcaacgacgaaacactaaaagagatcgtaagaattgccttacaattaagaggtaagaaagacgaacagaaagctattgacatgatcaataaattgggtgaaactcaatgctttatagtgaatcgtggttacaagtacgataccattgcaaaatttgaaaaagggctttgtgaattatgagttattatggtgtgatcccatacacaggaaacaagcaatcgctattacctgaactattcaagctgttccccgaaagaagttcatacatgcgtttcattgattgtttttgcggtggccttagtgtgtcgctaaacgtccctaaacccgttctaagcaacgattatgataagacgctgattgatatgtatgagcgtcttaaaacgcttcctgacctgtctccggtgcgagaattgattgcatcgaaggggctggggaaagacaagaaagaagagtatctgaaattccgtgatgaatacaaccagaacaaagatcctttatggctctatgtcctgatcctgcattcattcagcaacgttaaccggacaaacgacaaaggtgattttaacgctgctgtaggaaaacgaaccctcaactttatgacagaaaaacgtttcgaacatttcaaaaagaatgtgacaggaattgaatttcgttctggttcatactctgatattgaaatcaacgataacgattttgtttattgcgatcctccgtatctgatcactgatgcggtgtataacaaattctggaacgcagatcacgaacgcgagttatatgctttccttgactccctgcatgagcggggtatcaagtttggtttatcaaacgtgacacatcatgcaggaaagcaaaatgatatcctgatcgagtggatgcaaaaatataatgtgcataacctcgataaaaagtatctgttaggccagcatactgattcttacgaacaaaataaaacgcaagaagtctacgtgtgtaactatcagaaacgcgacgtaaatacataccctgaaacactggatgacttaatgtaaggtaacatatgtttaagatttttggttatatcccttctgtttacaattgcgctccatgcctgaattctaaacgtctcctggacgcaaaacgaaaagaatatgagtttgtttctgtagccgatgaaaaagacgcagacggcaaaccgatcctgaatgaaacggtcatttctgaactcgaaagcctgttgggtactcgtagactgaccatgcctcaaattttccacgatggtaagcacatcggcggctttgaccaactgcgtgagtacgttcgcacgttgggataaatattaacacctttatttgattggtgttattatgctcactaaacgtattactaagaaagattatccatccattaaacaagctctttttgaacagcaaaacggcttgtgcgcgttatgtggtcgccctttagagggtgaccttgaaaaacatcaccttgaccatgatcatgctctatctggctctaatgccggacgtgtgcgcggcctcctatgtaacctatgcaacggtacagaaggtattgtaaagcacaaatttaatcgttctggtctggtttcccgtgatgttgattacatcgaatggctagaaagcctgcttgcatatctgaaacaagattattccgaaaaccgtattcatgacaaattcataccagataaggtaaaatggttttcaagacttaccaaacctgatatgattgccgaaatggtttctatgggcttcgagtacgccgacaaagacgaacgcaaagccttaaccgcaaaatatagaaagcaattaatgaaggcaacgaaatgaaatatctaaacgctcgattatcaacgcaacagaagaaaaagctgatgatgttgatatcctccactgacaaaaagatcatatctctacatgattggatgcttggaaggggtgactctgatttgtgttatgtcaaaccgaaagaccgaacgatgtttgatgatcgcggtcgcacattgactaatttttctcctatcaccgttattgatatgtgggaactccttgagattgtaggacgggatatacctgttgacggggttgaactgatcaaatatcttaacgagattggacacaatttagatattatccataaggcaacgaaatgaaagtagaaaaacgcgacggcaaaaccgtcgatttcgatcaagaaaaaattcgcaatgctgtgtataaagctggcggtacgatgacggatgctgactccgcgatcatgcttgtgttgcgtagtcagatccgcaacggtaaagcaatgaagatttcacaaattcaagaacttgttgaagaatctttaatgaagacaaatccgactgttgcccgtgcatatatcgaatatcgtcatgatcgtgatatcgcccgtgaacaaaacggaaaattattccgtgatatcaagggtttgatgactcttagtaacaaagaattaaccaacgaaaacgcaaacaaagattctcgcgtattcccgactaaacgcgatcttctggctggtatcgtttctaaacatatggcgcgtaaccatattctaccgaaacatattgttgcggcgcatgattccggtgatattcattatcacgatctggattacagcccgttcacgccatacacaaactgctgtctggtggatttgaaaggtatgctggctaatggcttcaagatgggtaacgcagacatcgaacccccgaaatcaatcggtgttgcgacggctctcatggcacagatcaccgcacagattgcttctcaccagtacggcggaactacctttgctaacgtcgatttagtattggctccttatgtggagaagacattcgctaaacatgtacgtgatgctcgcaaatatcaagtagcattagtaaaagattatgctatttcaaaaacagaaaaagacgtatttgatgctttccaatcgtatgaatacgaagttaacacgctgcatactgccaacggacaaacacctttcgttactattactttcggtactggtacgggaatgtttgaacgcatgatccagaaagcgattctgaaaaaccgtattcgtggactgggtaaaaagggcattacccctgtattcccgaaactggttatgtttatggaaaaaggaattaaccttgatccagaggatcaaaactatgacatcaaacaacttgccctggaatgtgcttcaaagcgtatgtatccggatattattagcgcggctaataaccgtcgtattactggctctagcattcctgtatctcctatgggttgtcgtagtttccttagtgtgtggcatgatgagcacggtaatgaaattcttgatggacgtaataacctgggcgttgtgacgatcaaccttcctcgtattgcgattgaagccgaagcacaggaagatgaagacgcgcatgatgcattttggcgtatccttgatgaacgtctggaactgtgttttgaagccctgatgactcgtattgatagtctcagaggtgttaaagccagtgtagccccgatcctttatacagaaggtgcgtttggtgtacggttgaaacccgatgatgaaattctggaactgttcaaaaatgggcgtagttctatcagtctgggatacatcggattgcatgaaactctgatgcttttcggatctggacaacacccattcgaccggatcggttctcagaacatgggtagactgattctggaatatctacgcgctgcgaccgaagcatggaaaaagaaaaccggatttgggtttagtctgtattcaacccctgctgaatctctatgtcatcgtttctgcaaactggactatgagaaattcggaagtatcaaagggatcacagataaaggctggtacactaacagttttcatctggacgttgaccgcaaggtaacgccgttcgagaaaatcgactatgaagccgattatcattacattgcaactgctggacatatcagctatgtagaattccctgatatgaaaaacaacctggaagcccttgaaaaagtctgggattatgcaatggataaactggactacttcggaactaaccttccggttgataaatgctttgagtgtggctctgatgatgaatttaaaccaacagaagacggttttcattgtacccattgtgggaaccatgatccggaaaaaatgagcgtcacgcgccgtacatgcggctatttgggtgctcccgctgtccgtgggttcaacgaaggtaagaacaaagaaatgatgcatcgcactaagcatcaaaattaatcaaaaagcccttgacttcggttgagggcttttgttatattgggcctatcgaaaaaggagacagattatgaaactgactaagaaaatgaccgatgtagtagcatgtgcgtttgcattaggctacaaagttgaaaatcatccaactcgcgttgaagtcatcaaccctatcaagggccgtcctggtttggttctgtgtgaagacggcacagcatatcgtaatgatgtctctttagaactggcaactactatccgcaccgcaaaacaaatgaaagatgttctcattagcggcgcaaaattgagggatttatgatgtattggacaaaagataaatttgtttttcgtgatgatacgtgctttgggactgcataccgaaacttggctattcgtggcggttcgttttcggctaatgatttgtctaaggtagtatttcctattaaagttactgagtatgacgtattcggtgttaaagggtttactgattactttggtacaaagtttgaatcagaatcttacatttttactaatagcgatcgtgaattattcaaaaaacacgttgttgttaaagagaaaccgttattaccaaaagaggatgaagcaaaggaaatctatgatctcctgaacatgcttgacaatctcggtacttgtcatctgttcggtaaacgcgcccgtaaagcgaaagatgttctcaacttgttgcgctctcgccggaattacctgatccgggaagctgaacgcaatctgaaaaattcagaaaaacaggctgaaatccataaatccacccttgcgaaactaaaggctttgtgatgtttccgttatacgctaaagtgcgtcgaaatgtcggtaattcatatcaggaatggagtgaatggctacgcgaaacgaagtcattctacatttcaaaagccactgatatgaaaggccgtaacattcgctatcgtaaacccagtggtaaacgagtgaatgggatagattacattgttcttgattcgattcgggatgatatacgataatttaactttgaggcaatattatgattttcaacaaaacaaattcacgtaatttgaactatctacgctgtgaactggaagctaacgaaattgaactgtttttctgtggggctacagatccggaacacaaattgcattgggtatccggtgagattgtaagcctaaccgatcagattgtcgaagaggctacccgccgcgatgcaatcgttaaaattggtgctgttgatgtgaactacgaaggacatccttcatttttcattcaatattatccataaaagtattgacctgtatatctgaatgtagtaacatccttcttgtcaactaaggaggatgttatgaaaatcaaaaacactgctactgaaactctttgcaacgaaattgcagaaatgtactggagtaaaggtcacttagaggctatgaaagagtttcaaaagtggtgtgatacccaaaagttagctaaatgggaatacatcgttattgttgaacggatcaaagaactgatcctcgtgaagaaaggtaacatgaaatgattcaactgaaattagacacaaatgcggtgttaagcctgtttccggaaggttcaaccgcccgcgtagacctccaatctgctatcatcaaaaacgtggtgaatagcgtagttggtaagcgtgttagcgaagaaatcaacaaacggatccaggaacagttagctgttctaatgccgaactcatcggaaattacacagatcatcaaatctgaattctcggattacgtcgaaaaacgttatggttattcgaatgttttcgatgtcaactatggcaatgttcgcgaactgtctggtaaaatcaaagaatcggtaaaacagcaatgccaaaccattcttaaagatatcgagaaagaggcgattgctcatgcaacagaaaacattattgcagacgaagccgcgtttatcgctcgcgtctcgaataacctggaagttactgtacgcaaagcagtaatgcaacgggttaacactcagttcccagacattattgacgaagcgatcagagaacgtctgtttggtgaaaaagcatgaattacgaccgcatctataatatggatgtggtcaacggaaaagggatccgtgttgttttgtttgtgactggttgcaatcataaatgcgaaggttgttataacaaatcgacgtggaatccttgcaacggaacaccgtacacggaagagacagaaaaccatctgatttctctgttgagtaatccgcatgttgatggacttacattaactggcggcgatccgctttaccgtgacaactatcctactatcctaaaactgcttgagcgcgtttctaaggaacttccaaagaaaaacgtatggttatggacaggatataccctggaggctttacaggccgacccagaacgttctaagctacttccttacattgatgttctgattgatggtaagtatgaaaaagatttgccaacgaaaaagccgtttcgcggttcagataatcaacgtatgatcgaattcgctaaaaattcgatagaaattaaaaatattgcttgacctaatgtgtaactatggtaatcttaccacatcgtaaatgacgattaactttaattgagagataatatcatgatcctgaatttcaaaacccgtaaagaagcacgtaactattgctggaagtggaacattcccctgaaaaccatccgtaatacagggcgcggttcttgcccgtggacagttcaagcaaatgaactgaaaacgttcgtggttggtaaaacttacaaactggttgaccgtgaagggtttactaccaattcacatggcggatctaacatagcaaacactatccaggcgaagcagatcgaaaaattcctgaataacgaggtaaaaattatctcgaaaacccattcagatactttcaaaattgaacatcctccggaaatgacttatatctctctgcgttcgtgggaagctcgttatttcgtcgaagttggcgcggctccagctaagaaaaagaaagccaaaccgaaaaaagccaacgttacggctccggttgcgcctgttgcaccagcaaccgcagatcttgatcaaatgcttgatggcggttcggcaatgtcggttgaactggatccgactaaatttgttgaaggccgttcgtatgttctggttaaaccgcagcaatttaaaaatcgttgtggcgctaaccctgggatcaaatcatataccgatgaacatagtaatggtatatacaccgtttaccatacgaattcgctcggtcatcatcaattgagcaaaacggtagaaaccattgattccccgaccggaattgttggttactatctgcttgattctgaacgttcgttcttccgtgaactggcaaccggaactgttgatgaacctgttagcgtttccggtaatagcgctatcgctatcaatgtagacgaagcggctaagaaagaagaaatcgcaaaagcaatggtacagcttgaagaagcggttaaagcccatgaggacgcgcttcaaaatctgcgtactgcttccgacctggttcgcaaagctgctcgaaaagtagcagaagtaagcaagtaaattaaactgggtgctccggcacccttttttatgaggtgacacatggaattattagaaggtaaatcttataccctgaacatcgacgctaaagaatttgcagaaaaaacctggcgaaatgctttagctgaattgatcaaaaacaacggctatattacaatcgatcgtattgcgattggggatactgaggacattgcttatgttctgcaagatgatttcgaatatgagatccctagccatatctggaaatacttcaaaccatatgatttaccggaagaagaaccgaagattgctactaaagaagaaatcgccgcgcctgatttaaatttcgtatcttccgatcctaaaatgtggatgactgtaaaacctgttcaacaagatatcaatgatctgcgatttgattatccttttgtcaagcggatcacttcgatttctgtactatcagcgccgacggattcacaggcacttgaatttgcattacagcatgttttcggtgataataagctgtacgcgattgacaaggaagctgctattgatgaacagaaaaaggaaatcatcaaccttctttctctgcatcaacaacttgaagcggtggaattgattgagcgtatgctttctgatacaaagaaagatatcattagcaaaatcactccggcacgaaggaaagcaattgatgaaaatcgagatttacggtattcccgaatcgcttcataaatgttatggttgtattgaagctcggaaattacttgatgagcatggattagaatacgaattttattctgttctaaagccagcaaataacagtgtggggtttgattacgatcggccccgcattgaagagttagcgaaacgtgttcgtagtcgaagcatggcatttacttaccctcggatctttgtagatggtaattttattggtggttatatgcaattgaaagagtatttgggtgaagcatgaataaagaatacattcgcaaagtagcaaacgctattcacgcaacaacgattgattttctggaagggtttgatcatattatccaccctgaaacgctggatagttgggaagccaaactgtttaaaagtatcaatgaacagtttccggaaaaggttaagcgctggtttatcagacaggaaatcgtagcaacgatccttaatgaacgtggtgttgaggcgttcggtgtaacccctctatataaacgaaaccagattacagacgaaacaatcaagaaatataaaaagatggttcggaagtaataaataatcagttaaatggccttcgggccattttttgtatataaatattggtattgaatacaatataggaaaaaagataatggtagctaaatcattccgcgcacgaagtggccttgatgctgctggtgaaaaagttatcaacgttgggaaggctgatcgtaatacgctgagtgacggcgttaacgttgactttttcaatgaatttaacggaatccagcagtatgacccgacccgtggttattctcaagacatggcgatcatttatgcgcgtcgtatctggtacgcaaaacagaatattgcttcccctgctggggctttcgacgaatccaaatggatcgcaactcgtaatgacccgaaatgggtttatagtaacgtaaccactccagatggtagcattattgaatctggtagttacattatggctgatggacgctttactgaacttctgtacctgctgccggacaacccgacagagggcgacgtaatcacgtttaaagattgtggtggtttagtaggtgtgaacagtatccttgttaagtctaacacccgtcagatccgtttacgtactgtacaatcagcacagtatcgactgacccacccgtacatgatcgcaacgtttatctataacggtaacgtatggcgtgttgctgaaactctggataaccgcgattctgagatcgtgaacgcaaccggaacaggttcattccagttacaatctggtatgacagttttccgtaatagtgctacaggtaaaattactctccagttgccgaaatatgcaaatgatggtgatgtgatcacaacctatgacgctgataaaatgaactctatcaacatagccgttttgcagatttatccaggtagtggacacactatttctgatggtgcaagtactggtgttacttcggtaactagccagaaatccggctttggtatgttcatctttgatgcacagaatagccaatggaaagtatatgatgctgataaccgtgttcgtctgcgtcgtatctatagtgatttaaacgcagttcctaacgattacgtttttgttactgcaaacccttctgggactataccaaacgttacagttacccttccaactgatgttgccgatggtgatcgcgtttacgtatccctttacatgatgggtaaaaaccagaactgtacaataaaagttaaagatggtacaacggacaagatccgcaccaacaaaaatatgatgcagttcccgcagcgcaaagattatccgcctaatgattggtttagtgtaacttcattagcttttaatgctggcagtgattacctcccgtatatcgagttttcttatctgaaagctacgaaagaatgggttgttgctaattatcgtccaatcgttgaacgtgttgatgcaactaacagatcgcgtactggtgttattgctctggctgcacaggcagaagtaaacaaaaacttggaagataaccctaacgacgaaaccgctattactccgatgacgttagcaaataaaactgctactgaaacccgtcgtggtattgcgcgtttagcgacaactgctgaggttaacaaactttcaaccgatacctatctggatgatgtgattgttactcctaagaagctgaacgaaagaacagcaactgaaacccgtcgtggattggcagaaatcgcaactcaggcagaaacaaacggaagcaccgatgatattacgattgtaaccccgaaaaagttgcataaccgtattgcatcgccgaccttaactggtatccttgcccttgttgctactggtggtgctcctaacaccaatacggatcgttctcaggcgggtactggggtttatgatcattcagattatcagaaagcggtaacgcctaaaactcttcgtgagtataaagcgactcagttacaatctggtgttgtatggctggcgtctgaaaccgaagttattaacggtactgttgcaagttcaaacgttccgaccgttgttactccggaaatgctgcacaagaaaacctctactgatggtcgtattggtttgatcgagattgctactcagacagaaaccaacgcagggactgattatacgcgagcggtaacgcctaaaacgcttaacgatcgtgctgcaacagaaacgctgacaggtatcattgcaattgcaaccactgccgaagtatcagcaggtactgtaacgaataaagcgatcgtaccgtctaaactgaaaggttatctggacgatacaagccatattactgttgctactgctgacgggttaactcaatctgggactatctggactacggttaacatcggtattcaatcagcaactgaaactcaacgtggtactttacgcgtcgctacacagtctgagacgaacgcagggacattagatacagtatttgtcacccctaagaagttacacgctaagaaagcgactgagagcgcagaaggtatcattcaggtggctacggctgctgaaactactgctggcaccgttgcaaacaaggctgtttctcctaagaacttgaaaaatacaattcaggttgatacttcatggcaagctaccgatctggtacgtggtactgtgaagctgtctaaggggcttggtacttggtcgggtaatgatgtggctggttctactcttccggatgatggttatgccgctgtaggtgttgctgtttctccgtatgaactgaacttaacactgaaacactatctgccgatcggggctaaagcggttgatgctgataagctggataacctggattcttcccagttcattcgtcgtgatgttaatcagacggttaacggggcattgactctaacgaaagcaaccactgtacaggctgacattaactcaacagccgacgcaagtttccgggtaatgaatgttagtggagatctgaacgttggtgatggttcatcgatgggtaaacttcgtttgaatggtggttcatctaacgactggtcaattcaagcaagttcagcctctgggcgtattgcaatgatctcaacgggtaacactggcacagttcatctttctgtgtataatgatactcgcggcgttgtagctaacgttaaattccaggctcctgaaattcaggcgattagcaaagtgacgctgggtaatgatacagtgatcacggctgctggttctgttctctctatgggtacgaaaaacaagacaactaagatcctaacttcggacgctggtaacattttggcagaagaatctgggaactcttataaagtctttactgagaagaacgcgcaaaccttgctgaatcctacgtatgtacgtaaagcaggtgatacgatgtctggacggttgacggtaagcaacagttcaattatcatcgcaggtcaagcggcttggtcaacgctggatgcagtaacagaagcatctagaggtaactggacggctgagatcacagcatcggcgcaatacaacttgcttcctggttatgcggttccggttcttgaaccagacccgattaatccggatatcatgattgtaacccgttatacctatgttaaagcacctggtactttaacgcagtttggtaacggaactgcattcacttatcagatttgggcacctcgtccgacctctggtgctggtgttaatgcgctggcgcaatccttctggatccgtcagatgaacccaattacgggtaaatttgatgagtggggccgcatgtatacgagcaacaacccgcctactgctggtgagattggtgcaacgtctgctgttggtactacggttaaaaacatgactgttaccgattggatcaaagttggtaacgttaggatttacccagatccggttactcagacagttaaatttgagtgggtggcataatgtcaaacttaatggcggggttcggccccgattttgtagaaacgcaaattctatcggaaacaaacagcgtaacttacagaataaccgcaaaggcaacacatcccaatgcggttcctaatcagtatgagtttacactaaatcaaaaggcggtagggacaccgcctagtgttgggatcaacgtatggagaattaacaatgctatagttgatccaattaaaaccttcacattatcgaatgataattcagcaactgcaaacaaagcgtttgttgaatatatggatgctcaaacttctgggctgtatttgataatgactaacggtgaatacaaaacaagccaaatcgttgatgattggtttgctaaaaacagatccgttatgtggcaaggcgctgatttcgctcagagattcccaaattctgcatatgttgcattgtatggggccgcaaaatctcgtatactgattgaatcgttttacgcgaacgatggaattttaaaagaagattcacgcgcatcaatcgaccttgtctatgataacgttggtgatgttggtcgaactggtgtacctttcagatctgttgaagatacggaagaatacaattcaaccaatggatctgaatataaagtatatcctgttgcaaacccagtgatctctaaactagctgattacggtatggctcctggattggctatgatgattactggtgatttttacgcaagcaaagcattattggatgctggatcaacaacaagggttactgttcgatggtttacgggtactgctcaaacttcatcatcggtgattgaagttcctgcaaataaacctgatgagtggttacgatttgaacagttctatacgatccctagtggttgtgatggatttaacgttgctgtatctcgttatcctaaacccgctacggatagtttatctgcgatccgtaacttcgtgatggttcaggtatctgctgccgaagccgatcaaaactttgctgcacagtttggggttaacggtatcagaatgaacaacatgatcgatggtggaacaccgtatatatttgaattgccgaatactaaggtttatcctggtggcgattattctgcttccgaattccgtgaagttgatgcataaacaaaggctcggatcatcgggccttataaatatgtaaaaaggggttattatggcagatttaaaagctggttctacagtcgggggtttacctatttggcactccggcacatttccgctggttccggttggtaatactctaacctatcgcggatataaggtttatactgaaaacgataaaccgcaagcatcaaataacgacttcgtttctaaagaaagcggtggtcaatatttgggtgtagttgcctttaaacaggggctacaaattaacgctactttcacaggcggaagtgaccagaacggtttatattctggtaatggtgatggcgcgggattatcaaaagccaacattgatcttgtatcatggtatggtattggtattcgttcatcttctggtactaatggtcgcgtattagtcatcaacgctcgaaatggtgatttaaacactcagggtaatattacggttgaaaaacaaatcagtattacaaccgctaaccctactgacgcaagtcatgcaacacgaaaaagttatgttgatggacagataaataatgtcacaacaaatgctaatagcagggtattacgcgctggcgatacaatgacagggctgttaactgccccgcaattcgcgagcacaggcgcggcttcccgtcccgaacacgtaccacggctcgaccaggtaattactaaagggactatcatagattttggatcttattaaggtgaaacatggctgatttagaaaaaattcaattcctacgtagcacagttgcggggaaaacacctactacaagtcagcttgcagatggtgaactggcgatcaacatggctgattatgccatttacacgaaaaatggttcttcgatcgttcagttagcgggtaaaggtatcccagaaacaaataccaaaaaattaacagttgatgggcctagtgctcttaatgataccgttaccgtagcggaaggtaaaactattactttcaccaacgagaatttaagtggtgaaataactcgtcatatcgtcggtaaatgtgccagcaatgatggatggtacatcggttccggtggtacaagcaataacggcattcttgaaatcggtacgactgatgactacactgaaactattcagtttgtacagcgcggtgctggtaacgtagaagccagaaaattagtcttacttgatagctctggtaatacgactcttcctggcgatttaagactgggaactaataagactgttaaaattaacaatggaagcactcttgttcttgaaatgggtgtaggctctaacgatgtttatattaaaaaccaacgaggtgtaggtgttcttcaattaactaatgatagtaatttaacgttcagaaattcccaggtttattatgccacggatggaagaggccctggtaaaggtggcactcttctgactaatgtagaaaacgcgcgtcagcttgagcaagataatttccctgtaactacaggctctgatactaagtggacaaaaattgcccttttaaaagacccagggtcaagccagagccgcttgcaactgatggtgactaacggtggtaactacggtagtacctatagctctgttgactttatcgattgtagtgctagaaactttccatcctcattaacaagcagtaacattcgtaatcatctacagattcgtcgtctcggtaatccggcacttgaagacacaaaccaactgcgttatagtctagttcgtacctctgaaggtttagaactgtggtttatgcagcgagcatttatcggcagtgttaaagttgcactgttatctattgccggtggtactgaatattatctgcctaacggttacacaacttctgcaactgctccggaaggtttagttgagagtgtggctattcgtatctatgacgaaattaataaacctaaccttgacaatggtactgatggtattctgtctattgctaaaggtggtacaggcgcaagtacagcggatgctgctcgtacaaacttagggttgggtactgctgcaacccgtgatgttggcgaaggcgatggtaatgttctcgaaagaggtgcatttggtcttggtggtacggtaggcgctggaaatattgcaaagggatctttagcagagaccgttaagtatcttaatacatacggaacatgcttctttagggtagaagataacattgctacaataccacagtattctcctagcatttatgttaaaactggaagcaaccagttaattctttcagctaaccacagaaacggtgttattagtgtcgtcactacggataaagttgatggtactaatttaacggtatctcaagtatatactacgttgaataagccatcaccgtctgatgttaatgctgttgctcgtactggtgatatgatgtctggcgatctaacgatctccaaagtgtctcccggattccatttaaattctgagagcggaaactccgtaatttggtttaagtataaaggggctgaaactggtgctgtgtgggcgttgcctaacactgcctcttctggtgaagttcgcattcgtgccagaacgtcgggtggaacgactggtggagaattctcgtttaaatcagacggtacatttacatcacctagtgatatcaatatcactagcggcgctttcaacggtaaaagtgtcaatactcagtatgcgaactttaataacacaagttcaaccacaaccgaacaaaccgtttctattagtggttcgcagcacactccgctgttactgaatagaccgactaactcgaacttgtctatcgggttcaaactttccggaatgaacatgaaacgtttgggtattgatgtaaacggtgatattcgttacggtgaagcagaaaaccagacacaaaacgcatggctgttgacttcggatacgataaacagatggactgttaacttcggtcgtgatattaacgttgctggtgtggttaattcaactggtggatttactggccctgttactgcgtacaatttgactgatgcaagtcaggaccttaatgatttaaccttgaactataccgaaccgggccatattaaagtttactcatgccgcagtgcgggtggcggtagtaacatcaccaataaaccttctggcgtcggtggtaactttattgttattgttgaatgtatccgtaaagtaaacgataccgattacactaaccgtcaagtattacgcgcatcggacaatagccgcagttgggaacgttggttaactgttagcggtactactaaagcctggacaccgtggagaatgaacgttgttaacggaaacgatgatgatgtatcatttaaatctgttaccacgactacaggaaacctgaacagcggaaatgatctgattgttgctaacaacgctcgcgtaggtggtaacttagggttaggtggtgcttcttccacgaaatacgctgataaaggtgttgtgattggcaaaggtagtgctctgttagaaactactgatggtcgtgtgattattggtagttctggtggtggtaatgctgttgaattgcgtcctggtggcccaactcaaaccaacaacaggatcaaagtaactgctacctctggaagtggtggtgatactgcgatcgagtatgaacaaggggcgaaaattcgttccaataatggtggtgatttgattgtttctgctaaagctggtcaaacaatctatttgcgaccgcaaggtgatgcatccagcacaaacgaaacccgtattgatgcaaacggtagtatcacgattaacggcaatattaacgccaacggtacattaacttgtactggtggtgctgttaacggagacttgactgtatcaggaaaagtagatatcactggaaaccagttaaaaactacttctttgtgggctactggagacgctgctgttaatggtgctttaactgttgacggtaatgttgttagtaattacggtattggtagctttgttggtgctgtagatgttaaggctcctgctgcggataatggtacaacacacctttggttccgacattctaacggtggtgagcgtggtgtgatttatatgccgcgtgacaataataccatgatgggtttaagagccggtggaagtgaatggcaattacatggctctgcaggccaaatggtagggccaggcgcacgctggagaattcatcctgatggcaacatacagggtgatgtttatggtggttatatcactaactatatcaacgataggtttaaccaatgtgctcaatgggttcgtactggtgctcaacaagactttggcccaattggtcgaccggcacctggtaaaactgttcctgctggttgggtacttgttggtcttaacggtaacagcaacgaagctaaccagaacatgcaacttatcggcggacggttacaagtatggaaaccgggcgttcaatgggttgattctgctacttgataataaggggcttcggcccctttaaacttaaaggtaaaataatgattgttaaacaaatgaaaggtattaaatggcatcacaattttgaaggtggtgcttactatcgagattgtaatgataagtgttggtattcttttagaaactctcttgataaaaattcccatattattatcgttgatgctaaaacaaataagataattaattactacaacggtgaagatcctactatgataggtttgtttgctgataaagaaatgattttggatgtatatcagctcgacgattttcctgttgattcgtgggatgaattctcaaaaaggaagttcgaatttatcgatggcaagaccataatgactaaagatgttgaagttgaaaaagaaagaaccaaagaagacatactggcggatctaatcaagctacaaaaagaattagaatctatgtaattttaaaggctaccatacaggtagccttttgttgtatcctaaatatacgtatagtaacctaagaagagtcttataaaaatggctgagagaaatcccgtggataaactagccttatttgatcgggtaatctcgtttgtgatgggtgtgaaaacatggaaacaattgctgataaaaataattctaataatggttatgtttcttatggtagtaacttggtacaaatggactgatatattcccgatgataaaaggtgcccttgtagtcgatacaagggctatcgaaattgaaagaacagaaaagtttaatcaatccgcgttggaacagttgagcatagttcatcttacttccaacgcggatttttcagcggtattggcattcagaccaaagaatataaactattttgttgacattgtagaatatcagggaaaattaccatcccagatcgatcctaaaaacctcggcggttatccgatcgataaaacatccgaagagtacacgaatcatataaatggcttgtattattcatccactaaagcaagttcctacctaccgacacgtgattttgtgccagtagcttatacttttagttgcccttatttcaatcttgataactactattctggatcggttttgatggaatggtatgcaaagcggcctgatataccagatatgaagataaacatcatatgtggacaggccgcgcgcattttaggtcgagcgaggtgattaacgtaatgctggtgttaaattgtgtgatcttccaatagcccgtttgattgctttaaagaagttcatcaccgggctatttttctcgtaaatatcccaaactttcaatttgtcccacggatccggaacataatcttcattccttgccgaaacccccaacgtaacccgcctgtatccagcgctgtcgtgataatacacgaagaatggtctacctattggcgcaactttacaacctctcttagcggctctcatagcctcatcgaacgtcattgatacccccaaaaatttctatgcatgaatggtcgaattccgatagtttcactcaaaatgaatatcggatgatctagctcatcgtggttttcttcgtcaatgacgatatcccaatcagtagccttttgttcttctaccgtggcaatgaatacctggtttacttcacacttgcggtgtgtacgtctgatgattgtatccccttcacgaaacacaatcatatcagggttggtagtgcggtacgcggttttacccgcgcacacttcattaagcatatcttcgtatgtcattataaaacctttacacgttgaacgatggtttgtttaacgtctttgtattctccgtgctctttaacggttgctttgaaagtgatttcatcaccttcgtttgcaatgttattaccgaagtaaacaacaacattaccatcaacattaattttggtcataaatctttctacagaagtgtagtaagaaacttgagtatatcccagtgaaatcactttctcaacggttccggtcatttccagacgttgtttgatttcaccgatgtggttagctttagaaatgcgttcctggcgctcttgttcccactgttcgcggatttcttcgcgtttggcgatataatccttctccagtgcaacacccatgcagtaagcgcacacggcgtcaaatacagggctgtttttgttgtcttctttagactggtcagcccaccaaagaacagtaaacattggcatttctgcaattacttcgcctttacgcttaccaatcggcatgatccctttttccagcagttccagtttttcagtatcgaacactgacagtttaccgcgacgttcgaacagatcgaaatctgcaaagccctggaataccattttgaaagtatcagtttcagttaaacgggctgaaacacggtcgaaatactcacgcgctttcgcttccgctttctccggatcggtagataagttgcagatatagttatcagaagtataaccgccacctctacgctcaacacgcaaggtatacattgcatttttacgaccagaagaaatgaagtaagtggtagtaactacggttgcgttagtcatggtatttctccttaaagggtatctcgtttcgatatggctaatataacaaaagcccctgaccgaagtcaagggctttttaatcattcattcgaatctttcattgttttatgaagatgaatatcaaaaattttccagtacgcctttccgcgaggataaatttttgctttgtcaatatcgttgttgcttccccatgtgttgtttgggccacgacatcgattttttatataatctgtatgccagaataagcgctgaaccgatgattccgtacctaatggatcttctttactgaacagaatttgtatactcataagaagaacccagtgcgaacaatcagatcgattttcttttcaggttcaaacggtgatttgctatcgatgttacactgatagaacataccaacatacttttcaggaatgttggattcacgcgcccatttcaggttatcatcggtattcggccccagcatgaggttaacaacatcaacagcataatcctgttctttggtgttgccggaaccgtttacataatgcccgtgggcggttttgaggatctcaattacttcgctatcgtcggtttcgacgttgtaaagcgttgtattttcaggaatttcttcaagaatgatcaaagcggttttcatcacacttacctttgtgtttctgtttacgttttgcttctttaaatgctcgcttgcgatcgcggtgagtagaagcgcggttgaaatcatgtttcgctaccaaattattcatataagccccttaaagaaaaatatttaggggctttcgcccctgtatcaatccagcagtttgcggatcttgtctgcgatacgtccggcgcgggttgcacttgcagtatgatcgctttcttttgaagccagttccgccagcttacgctgatgttcttcttctgctgcttgacgatctgctgcaacctgtgcaacctgctcattatcgtgagcaatacgcgcttccagttcagacagggttttgtcgaaagttgctacgatttcatctacagaacgaattttattaaacagtttcataatttatctcaattggttagttttaatcagtatacatcaatatggttgaaattcaaaatcataaatgtcattcagtgcgcggttccactcggtgtagttttcaccagcaccataacgcatttgaatagcactttcgaacgttgatccgttgaggttcgggaaaccgaacaggtttttgattttgtcatgtgctacatagtacagagaagcactttccagcatcgcaaccatcgcagacggttcgtgttcgcggcgcttgatacgtaacagagtacgactagcaccagttttacggcgttgatttggtgctacgtagaaacggaatactacgcgccctgttttatcatcaactaccaggtaaaacccgttttctttcagatccacgccttcgaatttcttgaaggttccgcgtttcatgtcaccaattttaattgcatatttgtgaatgtcaagtcttgtcagaattcttttcatattttttagataccagtttgcctaattttgtaatttcgcctgtttttacgttaacaaacaaggcgatgctcagaaatgggatgctaatcactacgctgatcaatgtaaacagaaaacgtatcacaaaaagaacagcacgttcaagatatcgttgcatccacgcgattcctaaacaactataccctactataaaggtggttgcaacataaaatgcaccaaatcctttacgaaatacgtaacctttcccagattctatccggtcgtcggcccacatttcacgggcagttttcagaatagattcaccactagcgcgagtttcgttagccgaaggcatgtttttaaatttcatgatagtctcctatgcgcccagaactctccaggcgcggttgtttagttagtaatggctaaaaccatatgtaacatcaatcatgactttataacggcatacacgcatttttgcgttattgtaatccactgggatcgctaccacgtcagcaggatccacctttacctgaatgactctaccaacaccgcccccgtagtgtggaaggtatgatttagccgcaacgtgtaggccagtagaacaggtgcgcgttttatcttcgtctaccatgtttcgaggcatggagacagtcacaccaggactattatcaaatttgccagtagcgagatctttatagttatcgcgcacacgtttccaggcaaggaaacaaccatcatcggtcagttcaatgtcattatgtacaaggaacccataaagctggtatacagcatcgcgtgaagggtttcgcatcaaccgttcaaagaagttcaccagatgttcatacggacgatcgttatacatttcgcgaatgattcgttgagtgatatcagaatcaaacactacatctttatatagaagctgatgaccaatgattttaatgttgcctttgctataggttcggatcgcttcttgagtatccaaacaagttacagcacctttgacatcaccagctttcagcatttcatgcgctttcttaaagttcggatgtgtttcacccgccatgaaaacgcgcccttcgtatacaaccgtaatgaacgattcagatccgatcatacgcggtacagtgtctgatactttaggcttttgttttacatcccttttcttagggaattccgctaacttgcggttgataacgcgcccaatggttcgggcgcttacgttgaactgttgggccagtgctgttttacttgcccccgtcaaccatccattatagatagctttctgttgtacttcgtcgagaattttgaccattatttccaccgtattaatttcttaaactcactgagattcttttcgttgttgtaaatcggacgaattgaataagaatcgctatgttcaacaagtgaagccagtaacgggtttagtgatttaaagatttcccatgcctgatcaacacgttttttcatattgctgcgtttaacgcgcattgatgctacggattcacgcagaatcggacaacgcaccctggaaagatttttaccatctttctcatacccttccagacacactatacgttcgagggtatcaacaatcttatacagtttttcattatatcggtttttcacaatccgatcaagcgatacaccgaaacggctatgcaatgcgtctgtttctgttgagtgatccttcccaatccatccaggcaagcaattatctttcaatgccttttcagatttaacatactgcttgcacagcatatcatcaaagcataccagatttgaatccgggatccacttccagaggctgttacgtatagcaaacacaacagggatcccagtatggcgcatgatacgcgataaagtagattctttcattgctgaatccatagacaacccggaattttcaccatctaagcggctatattcatcaataccatacaaccgaacacctggggctttatccagtgataaaaactctgattttgtcataaacagagaagtttttgccagattgccgttactatccaactcataacgatatacggtcggggtttttgggcgcggttctgaatttttcggtgcatatagcgcttttgatttttcgcgatctgtatcatagatctctttttcttttgtcatttcactggtacggagatacacaatttccgattcatcaaaatgaccttttcgaacgatatcattaacaatctcgcgttttgaatcgctatcgtaatacgcaacaaagctaacacggcttaggttatgcattttagcatacccgacgatatacggtttaaccgtgttggtatccacttttaacagaatgagtttcttctgtttccacggataataaatgcgtgtgatgtcctggcgtttggttgtttctggcttatacttgctccagcggcctccgctacccgttacctgataccatgcatctttaccgtcgtattcgttcgcccaatacccagcaatataatcatcattatatttgtttggtttgactagttcgctatggatccagccaatagaatcaccgttgatgcgaaaattagcatctttaccaacaaagttttgtaccattgaaggcagagaatggaaccacgtcagtttatcacgaacggtttgtaacttatcgaattctgatttaactcgattgaaatacacccggctgatttgtttcagacgttctttaacaatccctactgtcattttatccatactcaactcttcgcgagaaggcatgaaatcaagttcaccgatcgggaagtcaataatatacgtatactggctttctgtatagcaatagaacatcgaggtatcatacaaatctttatccagaggataaatgatgttacccatgcgagcatatacaccgctagtgtatgctgatttatgacggatcaccccgctatcgttggttgcttctttcggctgatagttgattttgagaatagaagcaccaacaaagttaggacgaatatcagtaaatgattcgtatacccttgctgcttcgttttcccattctttgatatcttcaaccttaaccggaacggtgatagtaaccccgttaggttcatcgctttcaatctcatacagaggatcgcagaacggttccccatcatccatatagattgtatatccgcatttgataccgtcttttacagattcaactgtgaacgcatcggaatagcaaagcggagatttgcaacccagccccatagaaccgatcaggtcgtttgaatcatttttagttgattcgaagtaaacggtaaacgcatcactaacgaaatcaggagacataccgatcccgtagtcacgaataacaaaacgaggatcaacagcagttggcaactggacatcaaacgggttctgatttcccgcttctttgtgtccatcaatcgcattacaagacagttcgcgaatgattgcgcggatcttgtatttgtatactgtcgaagaaaggatcttatacgctttcttgtttgcgcgtagagatagtttgtttcgtcccttgctggtatctgtaccaacacggtagatggtttgcggtgtatcttcgcgtaatttcattgtttatttctcacttaacattaaaaataacttggtcacaagagtacttcgttggctttttgttcagaccatattctactacttcacaataggtgtcaaggaattttaccaatttttcttcctcgacctgctgtttcttcatatcaaggataccccacacgatagccccgataatgacagaaaagaacgcacaaaatccgaatatggtcagatattttcccaacttaggcgcattataacgtgtcatacgttacccctctttgcgaatgtatgcaagttcttcatgggttactggacggatatacagacggccttttgtatatgccttgcgcccgctgatccaaatgtttttcatatccttaacaccgttcatcacatcgttgtaaaacttcttatcagctttagcctgatagacttcacggccttgataatctttcatgaacaaacaataaaggatctcgttcttatcaactagattagcatcctttgtagttgttttacttggtgaaggtttagcacccaggcgcaaggccatagcttgccacactttaccatgttcataaccgcgcccgacaagagcatgagcgatttcgtgtaaaagagtgtctaaaatatcctcgtagatatcttccgcaacatgacgaccagatagttcgatcagttttttggtataactgcaacggcccagagtttttgtaatgcgtccattgatccggaatgtccaaccattactgatcaaaccgtgtttttccatcatggtacgcgcccagtgggttacttccattgcactacgagttttcaacattttagaatctcctttgcttggtacaaaaccaatatagcaaaaagccccctgcattgcaagaggctttgttattatttcaacttcttagaaagttcttttaaatcattgagatactcaattttaggggttgtttcttcccagtatttcaactgtttccgcaattcttcggcttcgtcttccagctttttgctttcgtccgtggttagatggtagatgttcatagccactaacatttcggcatgattctcgcaacctatccacgtagacacgaatttaaccgcttcgctgcgactaaggccacgcagagaatcaggagattctaccatttgagcaataaacgcaacctttgccagtgctttatctaacgcttccttagtttcctggatacgcttattgatacgctgttgatatacattcatacgaatatcaacgaaatcctttagaagcgtttcagggcgttcatatgagtatagtttgccctcaaagataacgttaatgtttgggtttgaattttcaatcaacccgaaatctttcaggatcttttcgcgggttaacccattggcatactctcgcttgagcgttacttcataacgaaaatcttctttcgatagatccttgtagctaacgataacgcctttttcttccagcttgtcaaggattgcaatgtatttcacacggtcatacttcactgggatctcggtgatcaccaatttggttttaccttgcaattcatacgtgccgtaaattgtcccgtctgtgatttcacctttaaagtaaggatatttcagatccagtgtgaaatctttatcattcagatatgcaatgcacccgttaacaaccgatttaggatcatgaggcggaatgtttgttgcatatgcttttgcaatcccgctaaacccgttaaccagtaccatcgggatgatcgggagatagtaagctggcggcacatgttccggatcttcatgaactggcgttaaatcaccatccatataaattgctttgaatattggcgatagtttgcacttgatgtaacgaggtgcgccaggtttcttaaccaaacgggaaccaaagaacccatcacggtcgaataacggaatgttattgcaccagtgcgccgccataagggataacgcttcttctacagaggtttccccgtggtgatacccatacatagcaacaccgccagcgatagaagctactttctgaaatcccgttccgccctgcatagcagagtgaataaagaaacggtgaacgggtttaaacccgtctaccaggtgcgggatcgcacgtgaataaatcgtgtaaagggcaaacgttagtccttccacctgtacaacatctttaatacttctttccattagtcaaccttagaaaatttgtgttttccattaacccaatctttacgcggatcagattcgtcgccgaagcatagttctaacacttctttgtattcgtcgtcaagtacgatgacatcatacttcaactgatcacccagaacacggtcgtaatcttctttgcgtaaagaacccagccccttgatatatcgtacatcttttgctttatcgcggaacggtgcgaactcatcaagagaatagaaccatttttcctcgcgcccaactttagcgataacgatcggggttcgaatatatcggatccgtttctcagtgaacaaagaaggccaacggctaaagaatgcaagcaacagagttaaaatgtcgccgccgtcaacgtcagcatcgaccatgatgccgatattatcataagtcattccggaagtatcaccaggatgaatattgaggatagccattagctcaaacagttctttgtttttgataatgtctgtaaaactcataccccatgtattcagaggcttaccacgtagcgggaaagcgccttgtgtttcttcattacggcattcgatgaactgaccaacagcggaatcgccttctgtcagaaacaatgttgtttctaccccaggggtatcaataccggaagccggaacgtgtttagcaatttttgcctttttcgctttctttttcgctttggtgatcgcggcggcttctgctgcttgtttacgaatcaatgcggattcaatgatcggagtaatgatttctggggtatccataatcatttttgcgatctttttgtagttcaaattcgcatgattgttaaactcacctgctgtatttgctaatcgctcttttgtttggctatcgaatgcaggtgcattaaagttatgcaggaataccacaagagttaagcattcttttacacgtgctttcgggatctcgatactatgctttttcttgatcatcggttcaagttcagaatagataccatcaatcatacactcaacatgaacaccgccgtttttcgtatccagaccgttaacaaaggatttctgtttaaacccgtcctcagtgctcgccagaatgaagctgaggcgattatttgtctggacaatggttttatccccatacatggaagcgtacagcgggaagcgattagagagcgtttcgccgttatatgtgaatttcacagacgggaaagcaacggcaagggccattaagcgatccttaatcacttctttggtttcttcatcgataccagttacaccaaacatagagaagtctggagtaaacttaacagtagtaccctgttctttactggggctggttcggtaatcgatgttctgtgcgccgtccgtacagttaatggttactttgcgtttcccgtttgcagtctcgccaataaaaatcgagctataacagtttgtcaggaaagaaccaacaccattcatacccatcgttacgcggtttttatcatcgaagttagaacccgattttgccatagtccatgccgcaactggtttaggaactattttcccatctggggtttttacatcatcctggggaataccgcgcccgttatcagagattttaaccagattatgatcaatggttacatcaatcttattagcatgtttgaattcagttcggatcgcttcatcaatcgagttatcaaggatttcgttgatgattttaaccaacccttccacgtactcaaccttgcgatattggcccattatgaaacgttcatgcgcttctttgttaaccgatccgacgtacatatttggacgcaaccgaatatgatcgcgatcgctcatacaaaatgattcgtcaacctttgcgccttttttggctggttgtggtttctgttctggttcatcatctgccagaagaaaatctaaactcatattcacctctttgtttaatcactgacattatatagggttctatgaaaaagaaaacccctttcggggtttacttgttataagggaaaccatcacgaaccatttgaggtttatcaaccgttcgttttgcttcgcctccgcaatcgcaatctttcggtgcatcacgggtagcaatgcttgccatttttggaaattctttattacacttggtgcatttataggtataggtaggcattaataaatctcttttaaacttaacatcttaactaaacgggctttgtctatgtcaaaaacacattgacgtgcgcccggatacaacttttcaacttcgtataccatgcagacgaaaccaacattgtgcatgtactcgcgttcatatgcattgaaccaacgagaaaggcgctgtattgactgaaaaccaaagtataacccagccgcttgaaagtctatgttatctttttcaaggttgcgcatcaatcgattatcgtcatccggcgctggatgtcggttatcatccatatcaatatagatatcaggattcatacagaattgatccaaccattcagcagtatccattgacacataacgattgacatatgggccgctttttgtttgccatttttctgtacaatcattccagaaagaacaagaaaattccacacgatatacgaacatgatataatcctcacaagtaaactcaaggtttacaagtacgataccacttatctaatttttctgcaagcatttcgttgataatttttgcaatttcgtaccgtccgtgagtagtacccagttccaggtaaatcacatcaagtgcgcacacaatcgcatcaacactttcttcaacgatattaccgccgcgttgaggctgaatgaggcattcgctgatctcgccaacttccgctgataggtgatgaaccacatcactcttcgtgcgtttcttcactttatgagcgatttcgaaaaacttatcaagtacgatcgccgtttcttctcgcgttgcagtattctcggatgtcgtctccgtttgttgaacaacgtattttgtaaaatagttttcaaacacgttgaaagggatcacatgaggaacaccattcaaaaacaccccttctttacaaacataatggatttggcgcggaatagacaacccgccgctgcgttccaaatgtcgtttaacgcttgctacaaaatcgaactctttcccgtatccagccgacatactgtgatacgt

SEQ ID NO: 22 - DNA, 176170 bp, Unknown
  bacteriophage strain capable of infecting bacteria of the genus Klebsiella
gaactgatattgatgtagtaacaagtccgattgcagaatatgatatcaacaaaaatcagacagaagttcgcgttactacaatcaacggttcagaatatatcgttgaagcgactcctgattttatcaaacagctactaaaggtgatgaaagatgcttgatcatcctggctctatgagtatggtgctcctggaagcattaaaagcatatgatatcccttgtcatttcggtgaagtaactgttaatactatcattgacgaaatcgacaacccaaatactttcattgcttgtcttgttcgaaaatttacaagttgttttcgaccgagtccagaaaaagtagtaatcagttctgtttctgctcatcatcgagtgttagatgatggaaagattcaactttactggaaagttctttatcacgtggtgtatcatgaagattgatgatattatgtttatgcttagagcaataagcgcttctaagttctctcaatgtgtctctgttaatgtcggtgctgcattgagaaatggtaacgggcgtgtgtttgtaggcgcaaataatacggttgatcctagtcatcgttgtacagatcagtgcaatcacttattagatgataacgggaaactgagtgaagaaaagcgccctgaacattcacaatggtcagatcgcaacgaagtacacgcagaaatgcgcgttattatgctggcggcgtctcatgaacaaatcaaagacgcaactttgtatacaactcattccccttgctcacaatgtgcgaaaaatatcgaattttgtgttgcaacaggtatgattaagcgtgtagtatatctacataaatacgatcgtggtggcatcgagtggatatggcgtctacagcaatacggtgccgaagtagtacaacttgaccccgaagaaatgaataaacatttccggatcaaataacaaatgagtaaatgtatgtctgaactgagtgtaaaagcatcctttgaatatgttttgattgaaaccaacgctaaagcggctggaactgaaattgtatcaccttctggtattgtgactggtgttcgtcaacacggcgaggaaccgatctacggcacagtgttatcatgtgggccggatgtaccggaagaatataaaaccctgcttatgggtaagcgcgtaccgcttcctcatgcacaaatggcaaacgtgccggatcctgaactgattgcaggaaaggcaacaaaagaagaagctcgcaagtatccggttaaatatgtaaccgcacactataaagcgattcaagcaatttacgaataagagatccaacatggctaaacaaattcaagcaatcatcgccgataccgtcgcaaaatctaaaaaacttttcgacaaaggcgacatcctcgaagcaccgacccgcatcgatgtaatgacttcaatgatcattgatgctcaccagggaaaactaaattcccgtgcttcggaagtaatggaatacatcgtacagttcgaggatgtatgcaaatacgccaaagctgttgatccggctgttcgcgaaatctaccgcaaacagttctaaaaatatcggccccttagctcaataggtagagctaatcactcataatggttaggttcccggttcaagtcacgggaggggccaccaaacaaggcaaggcacttagagaagcgggaggaacagaatctgattctgttggttgtaggtgcaaatcctacccttgccaccaaattagggtgcgtagcgcaatgccgttaaatggttcggaatatgcaacctttctcacggagaaggctctgttggtatccggtaataggttccccggaatgcggggtgaagtaaagaaactcccagcccactaattttaatgaggtttatatgaaatttcgtgaaactgtgaaataccataacgcggtcgaatatacacagatttttgttgatatgtctcccgcaaaattcaaagaacgttatggcatgacatttaatgaatggaaagatggattgcccgatggggactaccgaaaaaacttcaaattcaatgaatgttatgtggatgatgatccttacgatctggatatttttggtaaaacaacgcctctcattgagaattcgccagaacagctttacgaatcttgtattgactctgcatacgaaatttaaagagataacatgaaaaatttacaaaaactgtttgaaatgtctccggcaattagaaaaatcatcggagaaaatagcaatccaacgaatcgcaataaaaaattgatggaactttttgcaaaagagttcgatgattttgattctgaacttcataaagcgcttgaggcatattctaaacaagggttctttgcatcgccgcaagtaaatagcaagaaagagtatagcgaacgattctttgattgggagattgtcaatctcgttcgtagaacaaatatatctcctagcaatcaccaattgatttctcttgatacttcggtattctttatccagtatcttatcagcggtggtttcaaaaatcctgaaattccgtttacaaatgaagcggttagcagtgaatttgatgaatcatttgtatacatcaacacaaacaaataatcaaatggctatcttcggatagccttatttttggggtgtctatgcgctttttaaagtatgcaagttggatcgtactcgtccctcttgacattattactggagtattagcaattctgtttgccccgtttgttgtaccgttctacaacgagaaaacagggcatcttcctaaaggcttccggtggatggaaaccttcgataatcctattgatggtgatggtggacatatccgccgttgggcgtctatacgctatcatctgggggattttgggtatacatgcagcgtgttggctggttgtggagaaacaaggcttataacttcgcatatcacgttttaggacgtgaagcgacaagcaaattcaactggaaaggcaacccaaaaacagaaggtgggccgaaccctgtaaatcatgggtatctgctcatgtggaacgaatcagcatgggggttgtatgtctataaaccgtggctacggatccacaaggtgcaattctgtttgcgcgtttatgctggatggaagctgaaacaagaagttagcgaccctgttaacctggatcgcgcaatgctggcgtttcatttcaatccattcaggtattatgtaatcaagtaaaggtaatacaatgaaagcatttcaaattttagaaggtttgcatacgggtacaatctatctggaagaaggtaacgacgttcggatcgtagtatcaaaaacattaactatggattctgtgatcggtaaagctcgcgttactccgtttgcaaagcgagagatcgagatcgaatatcagccaactgttaaagtggaaggtggacaacatctaaacgttaacgtgttgcgccgcgaaactctcctggatgcggttgaacatcctgaaaaatatccacaattgacgatccgtgtatctggttatgcagtgcgttttaactcactgacccctgaacagcaacgcgacgttatcgcccgaacctttacagagagtctataatggcaattgatgatatcaagggttataaaccccatactgataaaaaagtagaaacggtaaaccgtatcaaagatgctgaaaatgcattaggtgcaatcctggaagatatcgaacagcgactatcaaattcagatattgattcgctgatagaggaagaattagatgaggtgcttgaacgtatccatcaaatccaactggctaaagaccgactgaaagaagcctctatgtgggcgtgtcgtgcggtgtttcagcctgacgaaaaatattaaaaatcaagccgttgccgaaaggtagcggcttttttcgtttttggtgtaaaaagttgttgactcctttctcacattcccttatagttaatcccgtagacaagaaaacacttttatgaggatgacattatgaaacgctcttacaacatgaatgaactggttttcttcaaaactcgtcgtgaagcacgtgcttacgttctggtggctggtaaaaatacttctgctgctatcgatatgggtactgataaagctgttggtgctcgttgggccgctgttatcgttatcgctgctccggttactccggttaaaactctggtacttggtgcgcgtcacgccgaaactcttaacaccgctgcaagcggtaggggccacgaagttaaagtgttcaagaagcgttcttatctttcatgtgcaaggggttaactatggcacgattcatatataaagtggaatacgaaaatactgagttatctgatacctttttgaagatgattcgtgatcacgggcaacgtctggaaagagtaacgattgatactgcttttgattgtcctgttgggttggttctaacattatcttgcagccctgcaaaagaatcagcccgtgtcgaaatgttacataaactaaatgcattttatgaaggtggtagtgtatggcgagtattgtaaaatttttcaccgactcagtgaaagaaattaaaagcgctctggaacaatggaacactcgttgtgacgtatccattaaatcagagtacgaaacaacttatgatcgttatgatccggcccgtggtttgcacaataacccccatgaggtggaagtgtgaaatactacggattcaaaacgagtcattttggtaaagcgtatcgtacagaaaacatcgatcgcaaacgtccttactatgattctttagtacgagcgggacgcaaacgcgctcgccaggaagggaagaaagaaggtgaagatcgtggataattggaaaacgtggatatcaattattgttggtgttatcatcggtcggggtttgtatgatttaatcttttcggcgggggttcattatggacattggttcgggtagtcaatacccatcatgcgcgttgagcaacttcgcccctcatccattcacgtttgacggggtagaatgtgcatcaatggagggctttttacaaagccttaaattcagtaatcccgatatgcaagcccatgtatgtactctggtaggtaaggctgcaaagttcaaaggcaaaaagaaaaaatggtggactaaccagaccctatactggaaaggtatccctattcatcgttcctctgaggcgtatcaaatcctgattgaaaacgcatataatgcgttattccttaatgaagggtttcgccgtgcgctggcagcaaccggaaaaagtaccttgacacattcaatgggaaagaataaaataaacgaaactgtactgactgaaagagagtttgtacgcaacttaacccgattgagagatctgttatgagtgaaaaagaaagagtagaatgcgtgtttctgttcaaaggcgcgattaatccattagcgttactgtatgcgcaacatgcattacgttcaacgttgattcagagtgttatctataaagcaggtgtgtattatgttaccatcggcgcaaataacatggttgttattgaatcatatgttaaggaatgtgcatcaaacggcattgtctttgataaagtcgattttgatgcaggggtagatgctgtttatatgtataagggttgatatgagttacgtagtttatttcgattgttcggatctcgatccgttcgtgcttcaacaggcaaagaaatatcatcaagatgtcgttggcattggtgtaacaaatgatgatatgttgtgcatcgaatttgaatattatcggacatttgagcgtgaacaattcctgggtgaattgaatgcattcaaaagtacccttttctttgatcgttatgaggttatatcttgaaacctgttattcttaccgatattgacgggatcgccgtaaaatggcaaagcggcctcccgttctttttgtctaagcacaacatgcctactgatattgcattagaaatggttacagatgaaaaatttcgtgatatgaccgaaatcttcggatgtgatcagcagttggctaaaatccttatggaagaatacaataacagttctttcattcgttatctgaatgcgtatgatgatgcattgattgtgatcaaccgtctgaaaacgcagtatgatttcgttgccgttaccgctctgggaacaacaccaacggcaagccttaaccgaattgctaacctgaatactcttttcccgtctgcgtttaaagaggtgatggtcgtgggccacggtgaaacaaaaactcatcgttacctggaagcaaaagcaaagtatggtaatcgtctggtttgctttgttgatgatctcgcgataaacttaaacgaatgtcataacgtcattagtcagttgccgttattccatatgttacgtggtgaacgtgaagaaacaaatgcacctcaccagttagtaaaatcgtggtttgaaattgaagagaaactaaatgatcttgtcaatccttaatgaacttgcgtctactctgaaaaccaaagagaaagaagcaattttaaaacgtaatgccgataatgaattattgaaagaagttttccgcattacgtatacaaaacagattatgttttatgtgcgtcaatttcctctggtagaagggaaaccaggcacaacaccgctttccgatgcaatcaaagcattactggaagatttagcaagccggaaatatacaggcaatgcagctcgtgatcgtttactggatattgtatcatcagtgaacattaacgatcgtgaagtgctacgccgtatcattaaccgcgatctggaatgtggtgctggcacaaccttaccaaacagggtatggaagaaactcattcctgaacagcctcaatgcctcgctacgccgtttagtgaaaaggctttacgtcgcatcattttccctgcttactcgcagcttaaagccgatggtgcgcgttgcatggctgatttgctggaagcattaaaccgtaaggtatcgagagcgggtaacgagtacgaagggttaactcagcttgatatcgatctgaaaaagattcgcgattatctgggatatgatgtagttctggatggagaattgatttatgttccttccggaaccttaccaacattacctgaacctgaaacagacatgcctttttctttatctgctttcatggacgatgatgataacgacattgcgttatttgcggaagaagttcgcaaagtatcgaccccagaagaagaacaggccgaagcaaaacgcgaagaagggaacgggatcgtaaacaaatctctgaaagggacgatcaccgaagaagaacagcgaaacattgtttatgttgtttgggatattattccatatgaggtgtattacggcgaagctgaaagtgttcagacttatgatgagcggtttagcctgttgcgtgatatcctcctggatctttctctgccttctgttcgtttgattcagtctaagctggttaataacattgcagaagcgaagcaggactataacaattaccgcaatgacggtaaagaaggttctattctcaaaaacagaaacttcaaatggaaagattcgcgagtagccgatcaggttaagctgaaaaacaaaaccccgattgaactacggatcattgatatctacgcgcacactaaagaagaccataaggtcggcgggtttgtggtggaagatttatccggaatggctcgaacgaataccggatctgggttaactgataccgattatcgttacgatgatgatggtattacccgtgtatacattccattagatgaacgtggtgaactggatcgcgaatacatcatggcgcataaagatgaatacattggggccattgtagaaatggaagttgacggcctccagaagtcgaaaacgcgtaagaaaggggaaccggaatacagtttcttccttcctattatcaagaagataagacgcgataagaccgaaccagacgatattcatgttgtctttgcagatctattttaataaaaagcccttgactccggtcgggggctttgttatattgcatatcgaaacgtaaatcactgagagaatatattatgactagtagttatcagaaacacaaaacccttatggcaaacctgtccggtaaacatatcgacgaagtaaaatctctgctgacagtaaccgaaggttcccgcttcgaaaccaatcacattatcaaaccttctgtgaagaaagtactgaaagtgatttaccgacatccggtgtatcagtgcgttcatatcatgaacagcaacgcatttattttcgtatataacgaatccgatgataagtgtgttggtattttccgaaaacctaactttgaatgcatgagcgaagcggctgttgcaaccccgatcgttgaagaatatccggattatgttcaacgcaacatgcgttatgtgcaatcccgacttgattatgcatacgatttcaattctgacgcggtagaagcgctggcggatatcctttgcaaaaaccagaaagatcgtcaaatgacaaaatatctgactgatccaacaccgccaacaattcgaatttctgttgaagttccgtttgaaaatcatttcatggcagttgaagcgcttgctaaacttggtttagaagtgaaaacagaagccgtttaatagcactttttgttaaagaagcctcttgcaatgcagggggcttttttgtatattgcacacatcgaaacgaaacagacaaaaggaacatcccatgcaaatcactaaagaactcgaaggcaaagtaatcgttctggtaaatgaagaccgtttggcacaactgggtaacggtggtgaaaaactgccagcggacgcactcgaaagcctttctaaaatgcgcgtgatgcgcgttactgacggttgggttacttgtctgcctctgaacgacgaagacaaagccgtatacgatgcacaagcggattcatgggatatcgaagtacctctggtaaacatcgaagttgaagagtgctacgaaatcgaaaaataatgcttgtgttctgggtaatgtaatggtacattacctacatcgaaacgaaaggagaaacatcatgaaagttatgcacactgcaaatcaacttcaaaacggcaactacgctatccacgatgctatcggtgcgctggttgggggtatcaaactccttgaagtaagtgggaataccttttatggtgttgaaaacatcgaagcagcgatggaaattatcggtgacctgaaatgagtaagaaactcgaaatattcgaaactatcagcgaagattcgggtcttcgctggtgctgtgcgaaaactgggtttgatgctgcatggggtgatactccagaacaggcgcgtaaaaactgggaacaccaacaattgttttttgcctgtcgggttcctaccaattatgaggggagtcaattgttagcatgaaaaataaagaatatgacccaatagaagttaaagagcggttatcggtagcaagaagattccttgaatctatcgaccctgataaacttggaaaatgccctgatacgatttgccttaattgtgggcgttctgttcttgttggtaagtgttgcgataatccaaatatagttgtgatggaaaaggaacaagtatcccccgaaacatgggatcagatccaggaaatcattaaaaaccctccagcgccaactaagaaattacgtgaattgatgacaaggaaaatgaaatatgagcaaatttaaattgagtgcaaccgttcgccttattcgttggaatggtgaagagatccgttatgatgaccccgaattcgcccatgaaattctttcgcatcgtttgggattgaaaaacgcgtcattggttcaaactgttaaaacatcagcagagccggaaatttggcgttgtgttattctggatcttgataacaacattgattatgatgatcctaagaactatccgcttctggaagcacaagttgagaatgctccagaagacagacagtgttttttggttgagttgccacgcgaacattacgaaaacatcataaaggcccgtaaaaaggtcaataacaatgttttcgatctccacctcggattgtttgaggattaagtactgctagttgtgttcgtcgtagcggcgctggtaggttcccccacctgtatacattcaagtgtttgcaggtggaaatcttttgatacgtctcgaacacattcaacgatcagatattttcctgcatactcttccccaaatacctcaatgattgcccctaccttaacatctaaacgaccctgctttatatcgaatcggatccggcgttcatagctggataacaattgcattttagacgcctggaaaggtttaccttctgaatctgggttctgaaagttggtatcatagattgcattacggtttgtgaagatccatgtattctctgtgtctgtatcagccagtatatcaccgtacatctttttatcagtcaatgacagactaaagaaactggcgtctttaaacagcgttgtgttatccttatgggtaatgtactgggcttctgtgaatatgacagtatcgccaacaaacacgttatcaacgttaaatttgtatgctgggatcggtgtctgggccagaatgtcagttgaacttttaaggaaaataccggaaccatcttcccacagataacagaagtcagaagaaactacactttgcccgttgtccctgatataatcaaatatatcctgatatgtaccatttagacatccaggagggatacgtatgttaccgccgtcaacttcgggggtaagtagtttcattttgctatacagtgccgtcatacactctgtaatcgtctgtacggcgttgttactaaatgaacgggcaaacttacgtctgaacgttttatgcagcggagagaggttcatacgcagcacagagcggtttttatcgtcagtatctacgttagagtaaagcaatccgtaataatgttgttcctgtgtaccgttatactggaaagatacctgtatgatcggctggataagttgctgatagattaactgtgcgtcgtatatctgcatcagcgtttccgatgagccgttaatcatcgtcttttcactaaacgagacaagagcgggtagcaattcagtatatgcgttatcaatatatttttcgtatgatgtatataatttaatcgatgttattcgattgacgattttttcagccataaaaatccctcctaatatatcctatttactaaatagtaaataatgacccaggttcaatttgaggcaataatgaaaaataaaactcttgataaatttatgactacacggcttgaaatcaagaagactaacgttaaaaccgttcatcttccggatggaacagccattgagatccctaagatgtcgtatcgtcattttgtaaagattaaaactctgaaagatgacccagttgcgatcatgcgattcatcattgatgacatcaaaccgcgtgaactaacagcagcggaaattgaatttgtgttgatccatatgtatgcacacaataacgctgattatgccaatacgcttaaagaaattgggctaaatcttgatgacctcaaaatctccgaaccttgctatgattttacgtttgacaatgtgcggttagtctttgacaaacccagcctgttaaatgctcaccttccgttcctcatcaaagaggcatatgttgacggtaagccagtagaattaactgaggataaacgagacgaattaattaattgcctgtaccgattcgaatatgatcaggtatcgcgtggtgtcctccaggaagtatacattattcatgaggggaaaaccatcaaagggcttaacatcattggtgaatgataatggctaactcttatttcaacgaagaacaaaagaaaaagtttctgaacagaaacaacaacaaacaaccagcggtcaccaaagtaacagcctcccttgatgctgaaagcgcccgtgacctaaaggaaatcaacgataacacccttgaaagtgcaatcaatactcttgatatcaaagaagggttgaaatcgttcgaagaaaaattccgtgacaaattcgcggggttcaaagaacaatacgaagaggataaaaaggaatcattagccgaacaactacctgatttcgtcggcccgatccgtcctatatccttaaccgatgataattcaaaaactgttgacaatacagtaaacgttaaccaaaatggtcagttcggtaagctggaagaaaacaccgaatctatttttcatgctattaacaaacttgttgatttatatgaaaatactgataagcataagccgcttcctgaaccagtggaagaacccgatccgtatgtagacactaagaaaaaacgcatcaatgatgatgaagacaaaagaagcaaaactctggatagcattgctaaaagtctggtttctattaaaggctttacatcgcagatccttagccgtttcattggttactctctggaagcaatggcaaagtttgctaaatggacgctccttattggttcgttaatctttacattcgatgtgttgcgcgtcacaatacgaaaatggttcgaagatatcctgaaagaaggggaatcctcaaaaaaactatttggtacatatctgggtaacgtaaaggctatcgtaacaaagatcgaagaaggtttgaacaactttaatatgaacaacttaggtgaatcacttcgtgacttgttcgttgagcctatgaagttattgggacaaactgtacaaacggcaatcactgagggtatcggtcgtcttattcaatcattgggtgaatcaactggtatagacagcattaccaatgccggacgcggaatgcagatcaccgctttacgtgataaacagaaatttggtcttgaattgactaaagaagatattcttatgatcaagaaacaggaactagaagaccaaaaagcggcattagaaaaagaagataaagctattgcagcacgtcatgcattaacaataactccttctcaaattcctaatggttctatctataaagttgctcctactgattatcaagaaagaaatcagaaaaccgtagatgctgataaagaacggcttgataatatgaagaaagcaacggaagaaatgcagaaacaatacgatttagctaaaagcagcgaagaggaagcacaaaaattagccgatgaggaaaacaaacgcaaccgcgcacgtatagaagaagcaaaaaggttagaacaagcgaggaaggaaggaaaacagccgccagaaggtgaagagaaaaagggtgatgatctgttgggtaaagcaaccaactatgctaactctgaaaatctggatgcagccgatatcaaatacattaacgatgaactgttggatcagcttgaaaaacgtcgtaatgaaggtaatctggacgatgtacagaaggatagaatctctgaccttatcgagcaattgcaaaacaagattgcagcccgtacagaatccagcaccccgatcgacgcacagccaccgttagcagcaaataaaccggatgctgataaagcaagcaacattcaggttaacaacaaaactgttaacaacaacgtaactcattcagtacaacgcacagagcataaaccgctcgtagcgctggcataaggaacatataatgaagttttctattattgatgacagtataaacactctcaaaaatattaaaaatcgcggtatcccctctgggggtgccgcaatcacagaatcagtattaaagcaaactatcgttaccgccgaatttccggcccaacgtgcagcaggtatcgataacgcttataatgcttcgagtctgtataataacggccttctgttcactgcatatgattttaatggtgttggtagtaaagacaactatcgttcattacgtcaggcagcacagaacccaaaacaaatactatcatctgcgacgggtaatgttaagtacaaacaagtgttgaatagttctattggtactatggaacctgtttgccagatcctgctaccgcgaagcctgaacgataacgaagtaaacagccaccgctatcaagatgcaaacgatagtttcttaaccaaagggttgagccgtgttgtttcaaacatggtatggggcgctgtagaatccatttcaggcggtattatggcagaccgaagagaagcccttgatgttggtactaaagccgctttccagggttctgacaagcgaacaaagatgtattacaatacattcgtgatcgaaagccgtaatgatttgctggaactgattaaaatctactatctgtttactgttctgggatatggtacaacttctggcggtactgctaaagaggttgctgcattggttaaacagtattacggtgttctgggtgctaaaaccgctaacgcaattagcccttccagtaacccagtaacagcgtcagattttgataatagtctgggtaatgacgtggttgatttcatttcaaacgtagaggttattaaatcgcctcctgtctggtttattcgtgatttccagtctggggattccttgcgtttacctcattcaacctttgggccagcaggtattaccagtgttcgctttggtcgttctattgataatattgtaaatacattaagagaatcaccaaataccccgatctcacttgaggtcgaaattcaatttatggaactgatcgatatgcgtcaggattctatttttgatacaaattactaaggagatatgatgttttacaacgtagatgaatttttatcaggtatggctaatcgcgattttcagcgtagcaacctgtttagcgttgtatttgcaaccagccctgcatcacgtatccttgacaacacgatcggtagtattcgagatactttgattgatggatctattagttctatcaacgcaaacaacccgaacgaattcattaatgctatcactggcggtgtgagtaaattgtttagttacaccgtcgataaggcgattatgtcgctgaacaaaacaggatttagcaaaatcatcggggcaattagcccccgtttgattacttccctgtttggtgatagcatgtatggacaactgctatctgaattccgtgatgaaatgatgtataatatgggtttaagcattatgggagttaacctccctggtaaatccattgggtacgaatacgtttataatggtggcgtacctcaaatcagattcactcgccctgagaatggggaattgtcattgacgttccgcaccgattcagaagcccgtaacctgaaaatctttaacgaatggatttccgctattcgcgatgatgtaacaggacaatacgccttcattgatgaagtgacaagtactattcaggttaacttacacgatcgtgatggttcaccgcatacaacatacgtatttcagaagtgcttgcccgtcaaaatcagtaacagtgaattgagctatgagaacaacaacgaaatctggacatttactgttgattttgcctataaaacatcatgggttgttgaggctgataaagaaggctgggaagggttcaaacaatccgtagaggaaggtttagccattgcagcacgtaccgcaattacaggacaataaaggggctacggccccttttgaggatcttatgtttgatattattcgagtaacattaccatcagggatcaaacgattccctatgtttacagttaaagaccagtttaaattaatgctgacccgtattgatatggaaggtcggccccttaaagagcaacaggaaatactggatgaagtgctggatctgctttatcctgggtattccaaaacagaacaggaatacattttcagccgggtgtattgtggttcgttcggtaaaaacgttatcaaggttgtgataggcggtaaaggtgggggccactccgaagccttcatggtgattaatgatattcaactagaaaatgaatacaagttgaatgatgaaatcacattagggtttaacttcccccgtacacgcaatacaagcgaagagttgtttcttgaatgtatcagttatgtaatatacaacgaacagcgctatgaatggacatcactaaccgaagaaacgaaagagaatattcttgatatcgtcgaacttgatgatgtcgaaaaaatcgttactatgctaacgaaatcggttgatgtgtctatgcgcggtaaatcatttagtggtatgttaaccctgttcaagatattgtttagtcgtggggatctggatgaatttgtgaagaccaactatctgctaaataaaaacggcctgaacctggaacctatcatgaatagtagcccaatggaaaggcaaatttatactgcattgcttgcagaagacttgaaaaaacaaggtgctgttaaatgagaaagcatgaatataaacacgttgagaaatataatgttgattatcgtcctctgacacatacagagtttacccccaatgcagattttatcaaaggggatgtttacctgtatcaaagagaatatcttttcattctggcacttctggaaagtaaaaatattgatacccgtcaactgttcatcaactgtgaagaatgtcaggaaagaatagaattccagcttaaacgcaatcaaatcatggttgaagatttcgacgataagctatacggcaatgacggaatcgcgctatctgttcaccctcgtaagactggtgatgaagagatccccgatcttatcgattacgtaatgatagacggcgaacagatcatgtggagtgattgtagcgacaaagataaagaaatggtgttggatgcaatcgactatgcaacctataaatcgatttctaccgccctggataagccagcagtggtcgcaaacattccggtaaggtgttcgtgtggacatagccatatcgtctctctgagaggcttacagcaatttttaaaggtggtctaaatgggtgtaaatctgaggttgctatatagcgatatagaacctaacatgcaacgagattggaataatgacgtagcggcctcaaaaggggccgcagcagtgagaaatagtttgattggtatcgtaaccacgatcaagggtacacgtccatttgatagtaactttggttgtgctattagtgatatgctgtttgagaacatgaaccctctgacagcggaatcaattagaacttctatcgtatctgcgatccggacatatgagcctagagtatataatctttctgttgaagttattccacagtatgatgataactcagtaacagtaaccatctattacagcatcattgatgacccggatgacgtagagcaaatcaaactacagctttccgcatcataacaaaaagccccttcctttcggttggggctttttgttagaattcaatgaatcccattagtgtttgatatcgcaattcaaacggggagatataactttgcatctggttttgatcggatacgatgtaataatacacctcatcattatcatcgtatagtgcttctttgatgatgcaatatcgatcggtttccacgttcacataaagagtatccatgtactttgtaactttggaaccctgtgaactgatctcgtgaatagcgttatctatgaacagtgacaatgcttgcatgaagttatcaaactcaccatattcacagcccataatagaaattgcagtgtattggtgccagcctttgattgtatctccacggcggatccatccgatttgtctacccccgatagatacacaccacactttaccaatagggctatagaaccgcacaacttcttttaataacagggacatgaccccgcattttgtataaggattcattttaacctcatttcatatcaagtagccatgaagggctagtttcaagagaaatcgcagtatattcgtattttacagtataacctttgaaaccgaaaggaataattgcattttcattgagatattttactttatgctttgcttcttcttcattcagagcagcacagactgttgtttgttcaacgttaccagcaggagaagtaaatttttcaatgatgatatatacgcagttcatcctattgtcctctttccattttttcaagtttcatcgtatccacttgcagttgaagtttaagaatacaacctttcgatatgttatacaagtagtcactaacgatttttgactttacctgatcgtaatcagaagataacgtaatccaatcatacatcgtttggtatgatggaagatacgtacattgttcttcttttgataacgctttaaatgattggtaatcggttggaggttccgaagcaattgcggttgtggtcataagactaagtgcaagtagtagatatttcataatgtattcctcattgttttcgatagaaccaatatagcaaaaagccccgaccgaagtcaagggctttttcatcaatgcaagaaagatttcacgtactgttcgatcttttcacgacatgtatcaactgaggtgctttccgcaattacggcatgacataacgcctcgcctccgacccagaaactcatcatgtactgaatatcacgaccttccatttctttttgatgcgctttgattcgatcgaaagcgttttcgattgtttcagtagcagtaagcatttcggattccccgtcaacctccgccagttccccatcgatcatttcgctttcgacttcttcccagtatactatcgttatcatgcattaccccagtggttaaccgtcgtaatccccgccacaattcacattgccttcaatgaacagttcgcggttatcacgtaataaattatactttctttcgagttcaggcccgaacgcgtcggcgtcttcataccagctataattgtatcttccgcattcatcatcatattctggttcatcgtcgcgttcattgaagtgaacaattttgatatcgtccatccccagttctttcaacttatcccagatatacgaaatctcaacgctatgggaaccgaacgcttccagtgagatcgtaccgttgctatcgacttgaggaataccccacttcgaacgagtatcatcggtgatcatatctattaatgactcaatattattctcaccgtagatatcagcaacttccttttctttaccagggcgaacaagtccgatcccgataataaagctactgcttgagctattgctcacaaacccagaacgaattttcatcgcatcaccatattaccaatcatgaatagagggattagcgcaaagacgataccccatagaatgaccttatcttcacgacggtcacacccatgatagataacacctccagcgaaaatcaatacaacaactgaaacgaacgcgaataaagaaatcatttgcgggtatccattctcatagaaacttctttcaggatcttattcagatcgtgaagcgcatcttttacgttaccttcgttataggtaagcatatcctggtacagccctttcaaacaacgattgataacatatgctttttcagaaggtaacattgttccagaacgattataatctctgaaaatgtccatcatcgtgccgttgttgccaggtaatgacgggttgaagttaaccataccagacatcaaactatcaacataaacaacggttgtgttatcagaacgatacgcgccaccaactttaaaccagttgctgaacacatacggagattcccgcacttcgctcaaatcggttccgatttcatcgatgtttacacgaatgttgttaaaatacaccgattcatcaatagaaccaggacgccataagatagcaccgttgttatttttgaatccgactacatcaacctgccagccgttatctgttaaccggacatcatcaacgacgatgaaatcaggtagctgtgaatgaaagccgatgttttcaggacgggaattacgaaacccatcacgattggagaaataaaggatgtcgccttgattcagtttgcatatattcataagatttttaaagtccaattcaagtaattccacaagtcacctcaaagccccctttcgggggcgagatctcattagagtttaacttctttttcttccagaacgattgtgcaatcaaatttcacatctttccagaattccgctgcaacgatatctgttgcggtaacgcttacgctggtttcttcaaaatccagatccgcaaaccatgcgtgtccgacgacaataccgtacattacacgactcaggcgattattaagggcgcgaacctctttaatagtttcctttgtctgcttatcaagatactcgatcaggtcattcttgtcaagcgcttcgatctctttagatacggtatcgtaagcccacagaatgatcaggtcaccattgttgagtttcttcttaccttcggcgcgttttgcaacggtagccgcaacagccggaagtgatgaaacgcctttgattttcacgttcagttctttcgacatgtaaacatcagtcgattctgtgcgctcaaccttcggagagaagccgtaatcacggatcccttgctcagacaaccattcaccagccgcctcaccaaagcgctgtttaagcccttctgcgttgcgtaaaccaatcgcgttatcacggaagaacttcattaccttctgacggcctttcaggatttccagacggacgttatcagcaacaaattccttaccagaaataccgcgagtcatcgaacggttaaccagaggcagagaggtaaagtcaaccagtacagacatacggtcttcaccaattttagccagcggtttgatagtcagaccagaagcacgtaagtttttcagagtcgggatatcggtttccagcggaagtaccttaacgttaacgataccatctttaacaatggtaaagttacgcacttgtttggtttctactttttccggcaatccaaactctttttgtttgctttccggaatggttacgtaaccttgtagatccgtattgatagaaatgttcggacgggaactgttaccaaccaggtgtttcactgcaactttcgttgtggtttgggtaaattccggtttccatacttcatgcgctaccagttgcgccgccagtgctttacgttcttccggagtagaagcgtttgcaatctgttctgacagtttatccagagtatcatcatctttctggacagtctgacggcctgtacgattgtacgcccagtgttcagaagacaggtcgatcactgtgtcggtttctgccagcagttcgagagcatcaaccagagtaaacgcgttttcatcaggaaccatgttgtaatcaacaccatccatcagacgtttagccggatcaacaaccgcttcggagatcatatctttagcgttggaataatcctgtttggtaaagcagttatcgtatgctttaatcagacgcacatcacccagctttttcagaactttccatgccagatctggattcatggtatgaagcgcatgatacagaaccacatacagaacctgttcaccttctgctgttgccggatcgaagccgtcaacgtcattgatcgcgttttcacccagcgcccaaatgtttttgatatgttccggaaccagaacaacaccatttgcagcattcaggacatacacacggccttcatccaggtagatcgcatgagttgcatcgccaactttgacttcaacacgtgcggaggtttgcgcggtaatgatttcatcaaatgcaggtacatacgcatcaaacccttcaacgaatttgtgtaatgcgttggttgcttccgccattttttccagcagaggacggtttacataataaccatattccaggaaagcaatgttgttaaacgtcaacggcagagtagaacacgctttcaggatgtcatcagtacgccagcagttatcataaccatcagtcaggaagatcagactgttcagattgccattatccgcttgcagatcggtagcgacttcaaccgccagttgcagaggttcaacgaagccagtacatccggtcggacgcagataacgatcgatagcatcattgattttgctcaggtcggatacagagctaaccttttcgcccacgaatacagaaccgaactgaccacggctggagaaatacagaatagatacggtatcatcctgcttaaccagcgttgccaggttgtttttcaggtgctgacgaatgcgcgggagttcgttatacatcgatccggatacgtcacaaacaaaaacgtggttagtcggggttggtttggctacggcgtttttgaattcaatgttagtgatcataattttctcatttataggtaaattttattaaaatttcgtttacttttttgctaatagtatctaatgcatcatcgcatccaaacttactactcaacaatgaaacaaaatcatccatcgttgttgtttgagactcgccaacgtcaaaagacagagcgtaggcaacaggatttttaatccttacgatttgaatagtatactcattcagatcgaaccgttcaagatattttcgcaaagaaaataaatcaatcggtactggtagagtttgactaaacgttatttcttcccccagttgataggggggcatttttacacagatttcgtattccatcagtgatgactcttcatagtgtgttccagattacggaaaatttgcccgtgttcaagctgtgattggaattctccgcattcatcagagtaagtaaattcataaatgaatacaccgttctgattgccaaatttagcgttgtactcttcatacaaccacatcttgatcagagcgtctttctcttctttttccagatcataccagtcacgcccatcataagcaagcgcaatttgaggattagaccgatatcgagtttctgcgctatcttcggtttcccattcataacgcttatcatcatagtatgattcgaaaccatcacccatatgaccacccaggtcgcggtgtacttgctgtacaacttcttccgctgtcgggcaagtcatccagctataaccacagttaggaacacaatcacccatcatttcgcggagattgttgatatcagtcggatccttcgggaaccgtacaataaagctacttgatgaactattgctcacaaaaccagaacggattttcatttgatttcctcaaattcaaaagcggtgaaatgttttctttcgtcatacccaacagtacaacgatgcgtttgctttccggtaaacccgtcaaacacagttacacaatagtaatgcaacgacggaagcggtgtatgtttaatgtatttgatcgcgacgttcaggtcaacagtagaacatacacaatcagacgtttgctcaaaacggtcatcaaaaatcaactcaatgctatagatgttcatctttcacttccttcatgtttttcataacctcttcaaaagttacggggatttcgttgtactgtagtgattcatcatcccatacatcgcgatgcccgaatgttgaactttttgcaatgattttttcattttcccatacatcaatagtaacatgatcaccaagataagggaaattaggaactttgttcagcgcatcaacgcagttttgcaatgattcagaaacatgggcaatttcagtgaattcataatcagcactataagaagctacgtaaatcatcaccaccccctaacgatgctaaccagcagtaaacccaggatccagaacacagcaaccgcacaaatacgggccattactacatttccgcgactagtccactccgcactaagaaacaagaggacaaaagttaacgcgtataaaaccatttcaataacttcggtaatcatataaacctcacgaaaaagcccctttcggggcttgtttaattaatgcccgaacacaccacgaatagactctgcgaatgcatacagttcaggatttttagctttcactgtttcgatttgctccagaatgtaatctggtttatatttcgcaccgaaccagcagtaagagaaagagcgatcccacatgaacacgttatagtattcaccgttgcgaacttcaaccatcacataaccaggattagaacccagcgggtaatctttcagaagattgaatttcgcgccagcaccagtacatccgttaaacaggtcattaaaagtcatggtatgttccttttgtcagtttcgtttcaacaaggtcactatactattctttgttatcctatgcaagcgcttttttgatttgttttgcaattgcttcgatcaccggaacagatacagagttacccgcttgtttgtacgcctgtgttttgctcttatgcatcttgaatgaatcaggaaatccttgcaaccggaaacactcgcgaggtgataacattcgagggttcttaccttcctgcaataccagacattgaacaccatccttatagtattgggctgttatcgtcccagtacacacagaatcaactgtaacggcctgatagccaaaccccttgccgtttgccttgtttcgttctttacgctctctaaagcccttccaggcacgatctgatatggtgtattgatcattatccggttcgagaatgtcaccgacccttgttggggtacgtggaggaacaggaaagctaaagaacaccggatcgcgaaagcagacaataaacacacgctctcttcgttgaggcaatccaaaatcttttgtattcattacctgataatggatatcgtatccttcgtcctgtaacagcctgtagatggttttaaacgtgttgcccttgtcatgggttaatagctggggaacattctcaaagaacagcacagagggctttttagcccgtataatgcggagtatttcaaagatgatagtaccgcgaggatctaacatgccctgttttaaccctgctttactgaacgcctgacaaggaaaccccgccaacaggatatcgtgatcgggtacatcgttttcatcaatggtgaatatatcaccctgaatattttcatcaccccagttatcagcatatgtttgttgtgcatgtttatcgatttcagacgttaaaaggcattcgaccccgccgaatgccttatcgaaaccgagcctcacgccaccaacaccagcgcaaaggtcaattattttcatacgtcgaaatcaacctcatcgattttgtatgattcttcgccaatatcagcccatagctgaatattcacactttttgcatcacgataaagagattgaccacaaagcccacctgtataacaagtttctgtaatctcgttaacttccaggcggaggctattgcgcataattttaacaacagccttttccattgccgaatctagggttttagtatcacccaatactacatctttaacgttcaaaataacatcactcattatcgccactccgtttcaattccgtgtttgtatgcgtcaacgcccagaggggtgatcactaaacacatatcagtatttttcgttggtgaactaaacgccatagatgcataacctttttgaatcagggcatcacgccccgatttactgggaacatcgttgaaatctaaatccaacatttttgacgagtatctgtaaagtttacacagaacatcaatttcagcgccggataatttcgggtatgtcatttgtagtacctcacaacatgttcagaatacacacgttcaatgaaatcattccagaaatcgcgatcaacttctttcggataaccagatacagccgccagcttttcaacttcacacatcgttgattctagcgcctcttgtacggttgcgaaaggaacaccgccagctttaaccattttcaaaaatgcgctatccggaagaggatacacaatatcaccttctttgaaaatctggatcaattgcataccaccgcgcaacgcatgagaaagagctttccagtcgatcccgttgtttgcttctgcttgccgtgcgcgttccccgtattcatcccagagtttatacacggattttttcatttctgctacggtgatcgtagactggaatttacgccccagaacttcataaaattcctgacaacctgatttcagtgttttgtctgtaacgaatcgacaaaactcgttggtcgggaatcggttagaaatctcaccaactttgatgcgcttgccgtaattagattcatccacgttacccagcaatgatgtaccataccagtaatcgggaatcatttgtaacacatcaacaacttcacgcagtgccgccaggcgagaacctttaacaccatacttcgccgcttgcttacgaacataaccaaacaggccagttaattccgtagtgtagaagcgcgaacggttagcgcggagatattgccagatatcagagttagcgatcagcttgctatcatctgcatgaagcatatcaatcgccacggtgtcaccatcacatgcgaggctaataaacttttgcagactgtaaatctgacgatctacgtcattaacatcgttctttgagtttttatcgccagttgatgtatcgatagacttcttcgcagtgcctaacaggatttcgcgaggatgagggagatagatccctttgtagtctttatcgcttgttggtgtttccagtccgtacaggtgagaaccgaatacggtttccataatcattttcatcagaattcaacctttaatgtttttgcgatcccgcgcaattcagcggtagtaatatccggaacgtttgttccgtagctattcccaaatacttttttaatcttatcacacaaatcgcggcgatacaccatttctttgtattcttcttcgctacgatacagttgataacccatccacccctcagcccatccggaattgcgcttgattttaatattagtacaacaatcagacccatcttccggtcggaaagatgcatacaggtactgacgcgcaactttttgtacataaagagttttggggctgcgattttgtcgctgatcgctacggatcccagcatcatacaatgtatcgccaactttcacatcacttaaatcaatcatttacgtctccaacaattagttttttcacagtagtgaacgggaacagacacgcccaacgtttctttactgcttctgttgtatgttatcacaatgaatcgattttcgccacccctaacacactccagatccaaaatctcgcgggttcccttagtgttcatgtctgcaacatagtattcttcgttgttgacaatcactatatccgacataatcaagcgaggtttcatgcagcatacacctctgattcatcaagccattccagattctgattgagtgattcaatcagctttttatcgcgtctggaaataacaacggtagaacctttttctgccttcgcgatgatatcaccagaagaagtgatgtattcaacctcataatcacggcgagggcttccgagtttatcaccagggactacattccgtttaacagattcatgggatttttcggtgaataccaattcattctctacatgggtaacaataccatcaacagcagaacgagaattaatataaattttgctaatttccgccatgaaaacactatctctcagatatcgagcagtcactttatctaaacactgagaagacactttatctccgccaggatataccgagataatcattacatgaccctgaacacgggcggttcctactttatgcagaatgtaaaccgttgaaccatcagaatctttagatatcaagatcacactgaatgattctttcttttccttccgagtttcaccacaggtaaaactcacatccagaaaatcaccaactttaacggcacggggttttgctacttgttcacgaacactaataacagggatcataatcatttcctcacagtttcaaattcttcatcagatttccaatatacgttaaaattacgacaatcatgatcggatgtcaacgtgtatttttcatttgttttttcgtcagtgataaccatagtttcattctcgatcgagttaacaccgtaaacgaaaacattctcaccacgtttgtttaaaaacgcatcacccttttcaatcaactgccaacaggtaacaggcaaaccacccggactaaccgggcgggtaacaagacaatagggatgtttaatcatttaaattcttccattgcataggaagtaagatctttgaaataccttgcggtgttgccttctgggttgtttgtaatctccatcaggataacagcactatcaactcctgctttcttagccatgaatgaaagggcttcggtagcaataatcgttgctttcataacatcagctttagaaacgttgattgtattcattttttcttccttttcattaatcacttggtatgtgtgtataatacaaaagccctcacgagaacgcaagggctttttattaaatttcgtataaatctggattcacaataaccgcacataaaagatcatctatatgtgcggcttcttgttctaaggtttgcttagatgaatgtgctttcaagcaacccccgtaaaggcgtttactatctggaaatgatcatcaaagaattccccttgtcgttgcacgacctcatgcatcggtagccagaacgcgtctgctgcatcatcagagccgcccataatacgaggtaatgaaccatcgttattaggttcgagcttgatatattgtgctacagtcggttttgagaagtacaccgaacgtttcggatgatcgaacagcatcgaattacggatagaaccacgaataaccttttctggtactttaattcgtacttcttccagcaattcacggatcgcacaatcaaggaacgtttcgttaccgtttttgtgtccacccggaagcgctaacgcatctttaccaggcgcaaacttacgacggattactaacacgtggttattacatacgaccactgaatcagccgtgcaacagttcagagaatccggatacggatattttttgaacttgtcaatctctcgttgccagtgtgcatcttcatgggacaaacgctggaattcttttgtttgtgtccattcatcgataaaggaaaccgtagtgctaggcgcatattttaacaaatcttcgtcccagccttcatggtgttcccagataattttgcgtaaattggtcgaggacagatcctggtctccaaccttcacagattcaaccggaatatgattccatccgaatgctttaagccagtaagaatctttgtctttttcgtacccgacgatcgcaattcggtcatttcgagtttcatcgattgccatacgaacacaggatttccatttttcctcgttatagagataatccggaatgtgagcgaatttgattctggctgcatcttcaacatcaagtttgcagatagaccagcgagtgatcattgcttgacgctgtttagcggtcaatgggtttaatgtgttcggatatgcataagcagaaccgatcagaatgtaaaccgtatcagcaacagcaagggcttcccttaccattttctcatgaccatagtgaaaaggttgaaaacgtccaattactacagctttatcatatttgtgtttcataacgtgctccacgtttaaaggttaatcataaaacagacgcaattattaaaacaccaaacaatccaccaatgaaaccaaagaatagtgaaatgagtattgtcaatacgatctgttttatgttcattatagtattctcgttttagatgtcaagcccccaaagagggggctttaaaacattatttacgagaatcgaaaatcactttacccgcataatccgaacccattacagtttgaggtacgccacctttatagcgggtagagtagttcatctgtacatccagttctttccagcggatcatttccggtgtaatggtgcgttgcagggcggcgttggcttctgcttctttcttcgctgcatacagacgggcatcagcatcacgttcgttagcgattgcagcgttttcacgcgcctggcgatcggcttccgcttgttttactgcttgtaatgaagtctgttctactttttgcagttcagctttagcagcgttaacctgttcttcgcggatcttcgtgttagttacctgttccatgataacttccggcagggtgatatcctgcaagaatacctgtttcacagtgtaaccgtaaggccgtgcataatcttctacttcctgctgaattgcgatttgcagttggttttggatcttcgcatcaaacaggtcttgcgcttttggtacggatttaccaaattcgcgaacagtggaaagcagtttttcagttacatacttatccagtgcctgatcctgattacccgcgttgatacggttgatcggtgctttgctaccgtcgaattgcagcattacggtcatatccacagtggatttaaatttatcctgggacggaacctgtaatttgtcgaacttcatcgcgatgtctttggtgctgaacgtatcaaacgttgccagcgggtttacaatgtggaaaccaggcagtacgggtttcggtgatactttacccatgaaggtttcagttttaaccgtaccgtcttgcacaatggtatacatgttaggcactaaccacagtgctgcgactacgcccagagcgatcagagaggttttcttcgggttgttcacgatagtgtttaagttcatcataatttccataagttgttgttcaattcgatagttattctatcatcacatttcacgctgtcaaactatttttaagaaagttttgtcagcttgtagattgtttgatagcacaagcccttaatctcgtccaggatgttcttcaaagaactatctactgattcgtagatctcgtttgcttcgttggctattttacggagatacgccaccgtgtcaagcacattttcggtttttagcacaggtttgtatcttcccgtgattcctatgtggatttcggtgaatttatcaaccaaatcctgcatatcttcgtaaaaaccctcatatgctttatgttgtgagtatgaacctgttgcaaaatgtgcgctatgcatataggtaacggacataaggcacatgccaataaaggcatctatcttgcttgagttctcagattctgtaatttgtttaaatgattgcatgatgatccctttatgaacgatggatacttgcaaactcatacgcgaccctaatccctagctttgcgcattcggattcagatcggcattgtttttggcgccattttcgttccatgtagttgtagaatagttcgcttgtatttacgctgggagggatcgttgtgatgtatacttgaagggccgcattgatataatcgtcaaattctttctgaaccggacggtcggcggcgtgtgttgtgggtgtcatcatcaacaatccaaacaacacagccattgatatgcgtttaatgttcataacaattactcttttactcatagacccactataggtctactcctgtatatatttatagcaaaaacgaggccgaagcctcgttataatatttttgttgtaaagtcaatcaagtaatgtcataccaacacaaacttctttcgaaagcgcgtattttgttcacgttttctacgttttcatcccaaccgatcacaccagctttcatacgtttcagttcctgacgtaaacgggtacgtacttttgaatcaattttctttactgcaatagaaagcattgcgttcagatcgccatgagctttgttaccgtcgcgacacagattattatcaaatcgaatgtatgcacatcctaatttgtgtttccagtcggttgagtgccaacgtaacccatccggatcaataccatgtttagcataataacgagaatactcttttacttcttctatcctttcgttagatgaacggtcacgaagaggattgtatttcttacggtaagtgcgactcataatgatctccttttgtttatgcttccactgtatcagggttgttctttagttgcaagtagtgttttcgacaaagtgaaacatatttgtcttctgccccgatctcaatctggtcgccattagcaacaaatttaccatttgcatcaatacgagcaacggtagttgctttctttccacaatgacaaaccccccgcaactccctgatctcatcagccagcgccagcaacatataagaaccttcgaacaagttcaactgaaaatcggttcttagtccataagtcattacgggtatatctaattcgtcaacaacccgacaaagatccatgacatttttcctggaaaggaattgcgcttcatccacaaacacgcaagaaaccagattcgggctgtctctataaaaatgattgttgtgaacatcataatacaagtccatatcaggcgtgatcatggtgcatgttgcttccaacccaatgcgcgaagagatactctgtttaccttctcgcgtatcaattgctggtttgtacatcaggatccgcataccgcgttcctggtagttgtatgcatcagtgagtaaacgagcactcttgccagcattcattgatgcataatgaaaatacagtttagccatttatcctctcaacaaaatctggggtattctggaattttccttccccttcatggtttttgcatgttttgtttgaacagtagatccaccaatcccactcatcataagggggtttggtaatgttcattacgcaaattaaagggaaatgacaatcccgacaacgaactttttctataatgtgtgcgttagccaattgaaaaccatcctttacccatgagtttttcattatgtcgcgcaagatactctttgatttctggcatccggatcgcagtgtcatactcttctttcgtcatggtatgatttgcgcaacccatacacccgcacacctgcgcgttacaccaacggagtgttccatatgtcgcaatcaccttcattgctttagctttgattttgtcagtcatgattataaccactcatttcgttatcttgtgcttgatgtatatcaagataccacatattgattttacttttcagttcgtccatttccttactcagacaattgtcaacgatacatagaacatcaacagtttctttacgctgcataatgttgatgttattcgctttcatcgcttgcgccaatgcattacaggttttaaccagtgcggcgcgttgtcctttgattacggtgatccgtttgttcgctttcttaatctcccgacctgctttgataggatccatcatgattaattcgccttacgaggatcgaaatgaacgacaatgatcgggtaatcaccagtcacctcattaataatgcgcttaatgagttcccagtcgcccccagcgaggccagcaccgattaaaggtgtgatgataggctttccagtcttaacggcgtcagcaagccctacagcctgtttaaaagcattgccgattgcgtcataatcgacacgcggcccaggtgtccagaaatcatattgagtatatgcattgaaaacaatgttgcctttttcgccaatgtaaacagaacaagttccgagcttatcacgggaaccttttaacgtattggcatcaacttgaaatgcaccaggaatacgatcgcggatttcgcgagcaataccagcgcccatattgcaatagcagttgcatccgtggatcaaatggccttcaccgttcagatacatattgacagcattacctttcacttctttaatgatcatttttatttttccgatatagtagggccacaacaaggcccatcaaaatcacaaggatccacaatacagtgaattgaacccctacgctcattttctcgctttccgttcacggcggcgatcttcttgatgacacatatataaaacaccaccaaaaattataaaaccgataacaacgcctataaagtatccagcactaaacatagtcatcatccccgcaatagtaacaaggcccagtgctctcatgcttaccagcattgtacgccaagaacaccacaaccgccgccataataataaaaatccagatagccattagtaaagtcctatgccagcattgaattcgtcaaccaaataagtacggaacttttcgcaccgttccttatttggcgcttgtttgcatagattcatcattggttcagactgcaaaaactctttttgtttcagcaacttaccgcgtttatacaggtgagcattttcctctccccacatataagcaacatctaactgttctgcgatcacttgcttacatactgcgacatctttgatatcacgattgttgcataactcatccaggcgagcatcacccgcgtgagcaaatccagcaaccagagttaaaagcagtgctaactttttcatgatgattccttattcatcctcttcgataggagtataataatgcgcattacagatatacgcaagaacttttttcagagacatatccgagaatgtcggatcctggtttcgtctcatcccactaccagtttcaacagcccaacgtttgttagctggattgtatgtcagccagtaacaatcccattcagacagagtatgttcgaacagatcgaaacgcttacgcccatttgcttgcggcctgacaaaaggttcaaccatttctaaagcggttaaaactcgattaaggtttgaaccgtcttcatccatcgcgatccgcaaacagtattggttaatgtccggatccataccatcgatacccagaccgatagattcgaaaaattttgttgccgcgtgataagacacactggaagaacgatattccaacatcacggggatcttttccccgtccttgacgttgttaatgatatcctgatcgatgagttcaatcaggtctcttttctctttaatcaacgtggaaatttcttcttgcagtggggctatctgtgcatgaagttcttttatccgttgatcaattacggtcacttcgaacgctaagtttctcattgtacccattccccgtttttgtcaatgtacatgatccaatcagcaaccgcccaatgggaagtattgcctttcggagtcgccacgatgtaggaaccagctttaaacagtacgcgtttagtttcgttcaggatcaggtcgctcataatgtattcctcatttaaccaaagtgaatcgtgattcataagcatcgttcgggcgctcatacacagtatccgaacttgtaatgacagtgtacacggtttctttcacaagatccatgattttctgtgattctccccagacattgatactaaaatacatcccatttttaggaataggattgtattccatatcataatacatatccatgagttcacaaatgaacaggcggcgctgttcgttatcatatgtgaaataaatgttaaaacaatcgagagatttactcaaagtaatctctttgataacgatgttgtcttgtttgctaaaatgttcgcggattgcttgcacacaacgcaacaggttagggtaatcatatttttgtgaaacaatgacttgatgtgaaacgctcataatgtattcctctcaattagatgcactcataataaaaaagcccccgaccgaagtcaagggctttttgtcaaatgatttgtttttcttctaacagcttcgcggttgtattaaccatacgagcataatcacgggcttctttctttgtatacttgaaaccagcgttatagctcgccagcgcctttttcaagtcgcctttgtggtaatcaagccagtactccagttcatagatcgcatacttcgatccaccttgaagagtttcgagctttttgattactacgcgtttaggatatgacttatccattcgtgcgctggcgctccttgcggtaacttgccagcatccataagcgtgatggccttttttacctttaccgacattctcacatgcgcgagactcgatccagacaatagccgctaaatgataacctaaacgtttagccttatctttttctacaggttttgcagtcttcaaatcatagttgtgtccaactcgataagcatactccagaacctctttctgcttcggtgtgatattatccaaatccttgatgtaggatggagaatttttgtttgccggaggcttcacagtagccttttgtaaaggcaattgatgagtaggcaaatccgcaatgaaatcccctagcggatccgtcgcagcgttgccagaaaaagagcacaagaaaatgctggcagcaattataattttcttcattttaatacctatgttgcaaaaagaagggcaataatacaccctattttatatttatgcaactattttagatagttttcgcgtcacgtagtttatcagcgataaactcagcaatgttataatttgaaatagccttgttaggatcgtatagcgcaatgatttcatctaacgataccataacggcatgtttaaagtagacgctccagctagtagtaaggatctcactgttgtcaaatccacaatcagggctgaacaatgcgcggtatttgtacccactgtatttcgtcagccgattcgtgctgtgcgcatcactggtgatcagaaaagtcccctggtgagtttcaacaacgaaaaagtatccgaggcgttctttgttgtccagcatcttttcaaacttgcgatcggtttcttcgcgaacaatacgagaagtcagcatttccaacactttatcgtattcgggccaatcattctcgatcacgattgcatcaaacggtttcttaccattaatcccgcgcccgatctcgattttcgtgcaaatttcgttgaacgttttcaaatcttctggcgtcagttctttaagatcgctcaattttgctacataataacgtttttctagtttcatttatggaaacctcaattcaaaaataatttcacagagttaccacatttgggacatgtgataaattttttcacgacataatcagcagcagagaaaaatccattgtaaatcgattctctcttttgctgtatatcagatagttcatattctaacccacttttacagcaactgcaaacagtaatcagttttgggctatggataacagtaatcatatacacctcacaaaaagggggctttcgcccccatcattagaaattgtcttcgacaaacgccgcgagacgggaacgatacactgtatcaagaatgatatggcttgagtgttcgtattctttcagcttttcaacagcccatacaaacccgttgttaacggcagtgtttcgagggttgtcgatctgcttaatgttcccgcatagtatcagaagtgtgttctctccgcaacgagaaatgatagatttaatttcgtggttgctaaggttttgacattcatcaacaatcagcacagaacctttgcccggatccggatgtccgatactgcgaccacggaagtaatacaggctagggaattgcaccacccctttttcaatcaaaccttcaatgtatttttcagattccggattatccttaaacagaatgttcaggctagtaatacaaggttcgatagaaggccggagtttttcgcccaatgtaccaggaaggaagccaatttcacttgataacgggctatctgacttcacatacatcaagttagcgtaatgtccactattaaccaggtgcatagcaccggaaacagcaagcattgttttaccagaaccagcgccgcccataatggtagcaacatcgatttcattgctcataatggattcaacgaaagccgcttgcagagaatcacggggctggatagctttcatgagtttgcgtttcatagcctgttcgtgcttaacaggtaagacattcaagcaaatctcatcagcagtcaccacacgcccgactaactcaccatttgaggtaatgtactggttaggataaaaatcttcgtcaggaagcgaactgtaagtgatttgggctacattatctgtatatcccaacacttccacagtatcccagaaatcagggatctctacataaccggaatacaatacatcgctatcttttaacgtatcgtcgccagtatactgttctaccttacacccacgggacattgcgatcagcaacatcataatatcgcgagtaactaaggttgcatcctgttgcatacaagtttcaatgattcgttcgtcttgcttgtcaagagcaaacgttttgtttccgacataatcaaccactttaagggtgatagtgtcagacagtgctgggtttgtcaggtttaaaggaatacctgatttcgtaatcgcatcatatgactgaccgaaaataacttttgacagaagccggatcgccaatcgtgcttcgtgcgctgttcgttctttcgttttcaggtgatctaattcacccatagtagcagaggtaataatgatttctgtaccaggttgagtgaatgaatagattgaataggggttactaatcaaaacattggtgtctaatacgtattttgacatacattaaccttatgtggtttcgttaaaaaatgcaccgaaaacctcttttgctttccggttataaacggattttgcttcttctggagtgttatagtaccccaaaaattttcttttttcatctatgtttatctgcgctttgtacttcccattggctttatgataagaaacacctttcaaccctgtactactgtttgagttacatttctttttcatcgcattttgctggttcgtcgctttctgtaaatttcttgctgtatctccattctcaacaccatatacatgatctacgataggaggaagataaccattctcaacgtaaaacactattcggtgtcgcaaatacatagaacctttaaaatgaatttgggaatactcgtttttgcttccggcttcacttccaggagacatagggccgcgctgaactttccaatacactttacctgtagatgtatcaacatctacaaaattcagaagagattcgatcccttgaatctcttcatgtatggttcttgatgaatagccatgacttttcattacatacccagcgaaattacgtgaatatatgctaatgggtgtctcttttgtacacaatgcatgattgtattatatacaatgtccatgcgttcattgtgtgtgagatcacactcatcaaaaataaggtttattgcctggtgctctattcgacgtccacggaaatgattaagaatcgcccctttactggtcaatacatcacatccggtagcaccgtgtagccgtttggcttcttgtgctgcatttaacgtatgcgctacgtaaatgttaagggaactatcggaacgtttcataaaatcaaacgcgcctttagtcttttgtgttcgtctacccagatccaacctggtttcaaataccataaaatcgttagggccgtaattatgcgttggttcttccaactctcgcataagatgcatcttacgacattcttcaattgtctttacataaaattcactattcatgttttacctttaaggggccaaagcccctttgttacgctaattccacatgcggggcatcaatgaattttgtttcgatcggaaggttcggatcatttttccagttgataccaaaacgcagtttaacacccagttcatcacctgcttgtttaacagcattcaggacaggcaaccacactttagggtttgtttgccagccttgaggcaacacgctaggatacagatccacagcatcacccgtgatgtgttttgagttcattgtttgagatacacccttacggacgttctcgcgctgttgttctacagtacgcagaccttcacgtacaccaaaatcaacaggagacagttgcagagcgcgttctacaactttcaccagttgaggtttaacacctttaaggttgttaaggcttttttgactgaatttaaacataaatcacctcttgtaaaaataccctgtttgggtacacagggtatttatggtttaagaggttcgataattaataatcgtaaagatcaccgaagcattcttcaaattcacgtttacgtttcatctgttcttcttttcgctctttcatatcaggaggaagacggtcttcattgacttcatcaatgtaagcctgtgcatcctctttggtcaggaagaaagcatggaagttatatccgttgcgcccattcatactacggtcttcaagagagaactctgtgtgacagtcccagtctttgtacatggtgatgcatttagcaaacagcccaataccgcgatgcatatacgggaatccagtaacaatcatcttgctacccatttcagccttttcgccattcacacaaaatacttcatacatgatcgcgcctggtttaacatctttcttaacagcacgtttttcaaaagcacttttcataatatattcctctcaattggtgtaactacagactactggtttattttctggatgtcaacaaggtttatcgttttttgacggaaaagttagagtgaacaaacgatcgtgaaggttgtctatccgttcacaagcctgtttcagtatggttttatcaccatcatttgttgtttcaatgcatccaagttcatcggcgtcaatgttcactacatcgctcatcaatgaagcaaacacgttagcatcaggatgtaacagttcttcgatttcggccttcatgccgtcgtgttcagaaaggatatcaataatatcgcgggttaaatctccctggtacgggaaccctgtttctaaatgattaatgatcctttgtgctttcgtaatcataattttacctacaaaaaagcccctttcggggctagttaattagagttcacagcaacggcacacaccgtattttgtaaatggagcatcaccgctaacgtaggcccagaaatcacatgcttcttcggcagtatcgaagattgcagcatcatagaacccgtgggcttcgttaccgttctcatcgatgaaaaccggagtccagatattaggattgaagcaatcgtcaacaacaacccaaccttctttagctttcattgcttctttgttggcttcgatgtgagctaagatttcgttcatgatgtccatttttctctcctaaagtgcgtttcgtttcgacatggctatagtctcataaccccgtatctacgtcaacacttatttgaagcgaattgtgctatttttgaaaaatagtccagagcacacagcaccttcaattttcacccctgtagggcttttagcaacgaaccctgttgcgtaggtgtctttctcatcacatgcgaaccaggcgtggcctgtgtacgtgatatcgctaaacccgttagcagtcagaatacgttcggcttctttctcatcggtgcatccggattgtgctaaaacgacaataactactaacaccaaagcaataatatatttcatgttaaactctttttaagttggttttactggcttcaatccagtacacgggatcagaatagttaccgcacatacccagtaacacagttgtacatcctaaatgatcggaaggtctcaatccatcaggatgaaaaggcaattcgttaacaccaatactggtagcaaaaagagcacctccagtactgtaaaatgttttgatatgatcgtatgcatcatcaggccactgaaaacgataagttttattgtcaatggttactgtatacatatcatattccgtaaacaacggatcttttccttgtgttgccccatacagagcgccgcgccattcaaccagatttgcttcaatgtcgcttacacaaatttcgttacccatacgcaaatcatgaaggatcccttcaatggtacgaatggccccactaagttcattagttaacatagagtttcctttaaatcggtttaatggttttcaggtgtagtttagcataaaaagaaccaaatgagttaccattatgatcaaatttatagttttcactcttccagtatttccccgatttcatcaggggaacacgcttcttacctgctgttatcgtttcaaccattccggtatgagtaaatgtcatgatataccctcttctttcagcacttcccagatcagtttatcaaggtgcatcaggttccacataaccgaatcataagaacccagtgagcgggagtaaatcactccccatgaacgataacttttctggaatgcttctgcactatctacatcatacggcatatcatcaccggatgcaatcaaaagtttaaggatcatcagactgttcagaagttttgaactagcgtcttgtgcttgtacttttgcacaataattttcaataatcgcttttgcctttggttcggtgatgcgtccatttttgcatcgctctttgtacacatacataagttcatcgattatttcttgcatataacgcctcccgttctactgctgataacccgcgaatgtagttctgtgattctctatgcgcatctgctacagcgcgtcctgctcgttccgacgccagtatataagtaacaacttcattacgaatgtgccataggtaatccatcattacaagatcttcttctgtatgaaaacctttaatgtcacactcgcagcaaatagcgtctctttccgatagtgccagttgcgcggattgcgcgttgattggcatcatactgtacttgtcgatcaaactatccaacgttcgcggtttcacaataccaactgttacaggaacaggacgaagagtaggtttatccgaataaatcatagtattcctcttcatcaagtctagatgtcagtttagcgataaagtcgaaaatgtgttgtgaaccatcttcaacataatgacggtatgcaagcaaagttgatacgtgacacatatcgaccgattcaactttgatgcttgatgcgatcattgtatcatcatttccatatccgtcaatatcacggagtaccatttcttcagtcgggaaacgctgaaggagtgacgcttcccgatccgataccagagcaactaagcgattatgtcgcgtgttgtacgataatattttcatttcaattccaccgcgtaaacatcaggttcaggggctttgtgtacgcgcatatctttaccgcataccgcataagccggacagttacgacaaccgttatgatccttattaccgatcagttcattacggaactgtttggttttcggatgttcccagatatccttaatgaaatcgttcgcttccgggacattcaaaccttcttcccaaccaccttcaacccagcgttcggtaaacgaacaagggaagaactcgcctttctcgttaatgtacgagctaaacatagttgcttcgcaatcttcggcatattgcttgtactgttcgaagtttgggtgtccttccatcgcttcaacaaaagcaggggctgaacagctatcgaaaccaaatcctacaccagaatcgaggcaatattcaacaagttttttatattgttcgcgggtaactgtgtcccagttcttgcctcgtcccttttgtttcagacccaggaatacgatcgcgttaacttgtttcaagcgcggatcattctttacagcatcaaccacgttaaacgcgtcatcataggttttagagctaaccatgaaatgaaggttgatttgctgttgtccggcttctgcaagattagccactgaattaaacgctacatcgaatccagcatgtttgtatactgataccgcaacagccccagcaacagccgctaaacgcgctgcaacgtcttttgatacatcagcaatagtaaggttaggtacaatgcctttagaacgcgcataggccatcatatcaaacatatcagggtttgtttgtccctgtgcatcagcaccgagggcgcattgtgttaaccagggcattttatcaatgatagatttgaatgtatcaagatccatattgaagccgttagggttattagacttgtagcagaaaccgcaaagtttaccagcagggccattgcatttagttgtgatctcgatatcgagaatttctgggaatggggcataggtaggatcagtttcaaacgatgttccccagcgagcaaactcaccagttttaacgttgaaattgtagttataccacttagagcgagcgtaacggatatcaccatcttgatagatgaacagggtaggagctttcagaacagtttgtgcgttattcataatataattctcaaaatctaacatgggattggaagacagcgcgagcgagactttcattatcaaacggtattgattggtgctgccctttgctatcgatgttaacgcgccaaaattcactagaacaattttcagtggagtagttcaacagcgttaccgttttattcttttccaaaaatacgcgtttgtcaatctctgttttgattacgtgttccatcattttacccaccgttgtttgcgttcgtcagccagttcttttttgtacaccttgatgtattcgccgttcaaggcacggagatttgaaaatacacgattgaaaagatttttcttttctttgtatgccggagacatacggatcgattcaatagtcatacccatttcatttttaggatacgctcttaactctgcgccgatctcatcaatccatttttggtactgatcgcgctgtgctttgtactgttcaaaagtcaacatgtccattttttatccccgtttcgtttcggtatgggtgtaagataacatcatcctacacccagcgcaagagttatttgtattccatgaagaattttattgcttcttctggcgtcataccgtcagagaaaaatccaaagaaagtacagtgatggtcgttgtatgaaatattcaaaggagatagtaaacttcgaacatgttcagcccacaaacgatattttttgctgaatggttgatctctcattcttcgtccccttgcgcgtagtattcacacactgcatcttctggggtgcaaccgtccgagtaaagagcatacatcagatcttcgtcataatcagaagaacccagcatatgttgaacagagcgtttccatttgttgtaatctttttcgccctgggtttcgctgttttctgatttaagcatttcgtacatgttcataggaatctcccgtagtcggttgcagcatcttccggatccgcatcaagttcgtacagttcgcgagctagtgcgctgggtttaatatcgcgccctaagtgggcgctaacattacgtagccatttcatatagggttcgaatttgttcattttatacgtaccgcgttaaaagcctggttccggagatcatacgctttttcaagctgttcagtagtgaacagaggactatcagtgttagtggtgaaactgcaaatggttttgttgtcggcgttgacttcttcgacaacgatttcataaccccagatcccgctatactcacatttcacgttccggtacttgatgtaaaccgcagcaacatcttcttttttgtagttccggcttttgtagatgatttccatgatttcctccttcgtttcgatgtgtgtacaataacagatcagggttatcgagttttagcaatttgtgctaattatgccattttcttagcgattttccaggaggctttgaacgccggaacgtcttcaatatcaatccagaaaccagatccgaaaccatcactatagcaagggcaaccgtcgcagtagttttcccaggtcatcacttcaccaccaacagaagcaccagtttccatagcacgtaatgcatcttcaactttttccagtttttcggcgttgtcgtcgtaaatgacaaagtaccatttaccgttgtattcgttacccagtttgattgattcgcgaacaagtttcatgatgatttccttttgtctgtttcgtttctatgtgtgtaatataccacaaccaggatttaatgcaacatttattttgcttcgagttcaatatttttccatgttttcatcggaacccctatcgcatcccaaaacttaacatcttccgctgcaatcagagtaaagaagatcccagttttccagtatttcccgtttctgatttcgtttgcgatctcattcaactggtcgcaaaaatgttcagtccaactaacatcaccatcccaacgagttttcccgttgtacagagagaatatgaaactatcaatataagaagattttccggtagagatacccatcaaaacagccaggattgtgcgaactgcatataaattctgaacctcaacacttctcgttttaatagtcatttcatgattcctctgttttgtttcgatgaatgcaatataacaaaacccctcaccataggcaaggggtttttgcaaaaatcatcgtttgattggggtattatctataaccctttgaatttccgaacgcatcgtagaatactgacacaattcggtaagcgcccgatccaggtgcatcatagcgtaagaaaactcttttccgcatttgtcacatcgagcgtataaatgtaaatggatgcgcccgatcccatctacctgactatatttctggaatatgtaaggatctgcacctcgatagccagttgcttgatgcttacactctcgtttgaaccatgacattaataatatccttgtacgttgaagcgatcacataacaattttcttgtttggttagtatcgctttggatagaatgcaacatagcgctgatcatgtttaggttattttgcatcatttccgcgctcatgagaacttccatacgcgcacgtaagcgtttattttcttcttccaactcaaccatacggtcatatgctttgatgcgctctaagggcatatcaggacgctctttgagtacgcgagcacgttcaacctcacaagcatgatttgctttccagtggttcgattccgcttcaaatttattaaggcggcggatctcttcaaccagctttttgatcatgtgtggatccatcatgtcgatgaatttcatcaagcaattggattttgtttggttgtcagcaacagaccaagacgaattatacgtaaccgtaaacgtgcggcccatttcatcaacaaccccgatcttgttatcatcggtgattgtagccgcccatttctccctcatggctgtacaggttccgctggcgacactatgcaacttgtttaatgttgcgtcatcaaaaacaatttcatcactcatgtatgcctcacatagatttcaaaatacgcagaagtgcgttagtaaagatatcaggaacacaaccaccaaacaacttatgattcatcagcgctaatttcatgctgtgattttcagtatatcgcccgttatggatcccccaggcaacgacattaccaggttcatgaataactaagttagtgagagtaacggtcatgcgctctttatcattgatagagaatgaatagcgataaccggatccgatgtcgccgtaaaggttaaggtctttcaatttcccttgctcatgcaagcgtttcatatgaactgcacatgcatgattaatagtcatttcgtcatccctagcccagtcatcaataccagaggtataacgaatattgaagtagttagtcagttcatttgatacgctcattagaaacctcacttttataaaattctttaccagacccattacagctactgcatttgggggaacggttgttatcataccgccccgaaccgttacatgcaacacatttccttaatttccagccatacacgaacctcatgtaataatcggttcgtgcggccttgcgttcatggaaattcatgctttgtaaacctgaaccaaccacatttcgatgttaggcgcgtaagtaacgtttaccttatgcatagtgcggtatttgtaagcggctttgtacgcatcgagttcagtcggaacacagaaagaaaaaccgttatcatagcgttctgcgttagaaacttcacaaccaactacagcggcaatgtttttattcatgttcatgatattttcctttctctgtttcgtttcgatgtgtgtaatataacaaagcccctgcactaatgcaagggctttttgattattttggtaatttttcgatggttgctttcaactcattgattttattaaagagttcatcgctatatttcatcaactcactacggcgtttttcggcccacttgatcaggaattcatgagaatctacaccatacgtgtaaccttctgcactcagttgaatacgagcacgggaaccataatcaacagaactttgttcaatgagaaacttaaccgcatcaagcagggctaaatcttcatgacttaccatgattccttctgcctttggaagatccacaacttcatcctgaatgagttcacgacgggttgtttcttccagtgtttcatgattctggatcatcgtttcgaccggatcctttgccacggctggtttgttttcacctacttcttccaaaaacatcaacatccatccaggaattttagtccggaaagaactttgtacttcactggtgcatgaatttcccagaatgtggatcgcgttgccatgcatatcaactttattgatatagataacgttctgctgttcctgtcggttgctaccataagaaaggaagcggcgtaacgatgtgttatgaccatacttccctaaatcgatttcagccaggcaatcaatgatcccacggttagaaaccttgtaacgcttaccctgtttgaaaaataacgattcttccaggtgagtaggggtaaactcttcataaagaacatagaattctttaggaattttgcgctgaaccaagctcagtttacaattattagaaggaacaataacagcgtgaatgtttccttctgcgtcacacatagcttgcattacttgcggatagtaaagatggtctttcttgcaagtatagctatggatacgactctgccgttttttgaagtaccatttaccagtttcaaaaggcgctgttgtaaaattcattttgcattctcatacatagttaaaattgcttgcatatgttccggtgattgtggaacccctgcaaagttcactttcaaaaagaaattcaaccgatcttttatgttgcactcatcgagtccaagcgctggtaatgaaatgttttcaaaagcacgttgttcatgtctttccatttcaccccaaaacaaacgggaaccgttaggcatcggtattccaatttcattgttccagaatttcatgatagttgtcaagcgttgttttccgtcgatgacttctacccatcgagattcgttgaattcactatcaaccgcgatcgcgatgataccgcaaggaaacccagtaatcaaagtcttcatgaaagcatcttgctctttctgcttccacacgtagggccgctgataggacggattcagatccagatcgttgttcttgaaccagtgaatgtaactaccaaccatgatcgcatgatcgcgactttggaaagtttttaactcacgaatacggtttcttacaatttcgtctgtcattataaaatcaccatccagtatataatcgtaatcataaccgctacagtgaaacacattgcagcgtacacccgcgcattatgaacctgtgttttcaattctgcgatctcttgatccttttcgctttcaaactcttcgcgagtaccataatacccaggatcgttagcagttgccaatctaaccgcatctttttcaaccagcgttgcataaccgctttttatttgtgtcgccccgtaccatccaccccgatcgttgttaatgatcagatgatcgcctttttcgttatgctttgattcaccaacgacaataacccgcttaccattcataatatgatcctcaaaggggccgaagcccctattttgcgttcttctgtagataatctaacagatttccgctttgatgtaaatccaaaactttagaaaacttctctgcgtttctttcgtttgtgagttcgtcgaaatgccatacaccatcatcagctattaacgcgccaggtgatgaacctgtttctacatcacgggaaagcgcaagccccagagggtgtaagatttcgcggttaatgcgccaaacaaggcccatttcagatagagtattaaaatcgacgtatttcatattatgcctttggtttcacaccgtaggccaacataccaaaacgatgatcattatctgcatctttaaacagaacttcgttaccatcaatgcagatgacctttgcttccggatcgatgtatggaagcaaccacaaagggatcaggcgtaggccgctatgttcatcccagcgactgaaattgagttcttccagttcatcaagggaaagctcattaggatcgatataacggaaccatttggtatttttgaggcggtcggggaagtttacaatttcttcatagccgaattcagcactccatgaagagtaaatagtgacttcggatgctttggttaaaacagcatcgcgaattgatttgcagatatcgattaaagtcagttgattttccatgatatatttctcatcttgctaaaattttaggcagtagttgccccatcgttttacgtgcatgtgacggaatctgtgagatcgggacatatttaaaatcatccatttcacgtatagtccgtccgttcttaacgaaagttgatgcacaatagcattcttccgctactgggtaatcttgccctacatagaggaataaagcaagggtttttgttttcgtgtaatcgagaacacccaggctaaccaattcctccgcgaacacttcaaatcctgtttcttcgaagcattcgcggatcgccgcgtcaatatgagtttcgcccttttcaacatgccccttcggaatatcccaatggggcgtttcagtggcatggcccatcaacacggcaccatctttaacaaagataatacccgctgatagttccatttattcacctgcaaaagcgttatcaaatgctttaagtgcgttgttagcgcgagcactggcttttgtctcaccagcatgaaggttttcgaagaaagtacgtttccacacttcacggcgactggattcatgttccagactgtttttgtgatcaccgcgaatctgttcttccatgtcataacggtacagatcgagttctgcgtttaatttctgttctaatgcctgtgcaaatacatgttcaatattcattttgtatagcctatttcagatttaaggttttcgagggtggagtgataaacaacattcccttcgtgtcgagtataccatacttttccgttctggttacactcattcattacattttcatctaaaccagggatcggcttcatgctgggagaaaacgcgatagacatcatttgttccgcactatcagcaaacccacaagggaaaacagatccagttggtttatcaagatacatcaactctactttagccatagatttcttcgaaatcctcacaatcaggcaaatacgtttcacagaaggtgcaaagcgtaaagaatgcaggttgacgaataccaggattatccggtagatacatccagaaggtgttagcaaacacgatgaatgttttcaggttttcggtggtaatttcgctaacaccatcatacccggattgattgatcgcgcgttgcagtggcacctcgtactgttcgcaatagtcggcataatgatcgcttgttacaaggccattagccattttaatcaaatcgacgattttcatgattttacatattccactttaacaggttttgcaacaaatttatctttggtgcgcccatgaccattacacaggtcacattctttgttgaaatctttcatatcttcgacccatccagaatctggcaacccagacggatatgcgttataacgaatggtttcataaccttttccgttgcatttcgggcaaacatgaggacgttcttttttagcagactctgccagttcgcgaagggtggtagaactaccataagcccgacacatgttttcaaagtcttttaaagtcattctataaacatcaatgacgttatattttttgccggatggtttagccataatatatttctcacttaaagaattttttgatgaaagagatagcaaggccgataccaaagaaaattaagtaaccttttccgtcaccgtgcgccaaaacatagagtgagctgccgtatgcgatgagttctgcgatgttcattaagtttctcatgatatcctcctttttctatattaagtatcttaccataatataaaccaaagtcaacaacaaagttttatcaacccacttatcaccagtcattagtaatcccctacaggttgagacgccgcaacactcaggatcttgaaagtgcaattgttccactcacaatacgtttttgcacagtgaacacttcctttcataacaaacccgtttgagaaaattaaccagtaaagtttcatgatagcctcctttgtttcgacaaggccaatataacaaagcccctgcactaatgcaagggcttttttcaatttttcaacatccaaagttgcggaggacaatctttagaagcgattagacgatccaagcgggacataacccgacgataaccgtcgtattcaaaattaatttttggtggaacgtagttgacctggattgtttttctgttagctaaagaaacatactcagggatcaccgttcgtaaccgtatagcgatcactggcttctcttcgccttcgttaaagaacatttgaacagttataggacaagcaaagattttaccatttacccgacgataaacaataacttcctgtgtcccttctgttttggccttcacagcgtaggttagaacataacacgaataatgatttgctagactcatcatgatatcgcgataagtttcaatatcttttttaatcgatactgaacggtctttaaagcgatctgaaatgtggtcagcagtagccgctaccttgattgtataccagtcacctaacgcgctagtaaacgcctcgctaacttcttttcgtacactgttaacaagatacattaaacgtgttctgttcatataatcctcactgatttttgaagtattcgatctgacgcaaacgcttttcagcggcggctttcgaatcgtattcaccaagttcttttgtgcgatcgtgattcaaaacaacccacttatcgccacgctgttcaatgtgttctgtaatatcttttaacgacttatccagatccagtgattcagcctcttcacagataatagtcaaatccacgggcagtgtcaacaaccttttcactccgctgatatcatcaagcatcgaatcgtatgcaagggttacgtgcggcttgtaatccggataatcgtatgttgcgccagcatcaatagaatctttgaaacggctatgcaggtattcagattccaggatccctacaatagtgctaccgtattttgtgtcccacttttcaacatcaaccagtttagcaggttctgtgatgtcctgttgcgggaacaaatcaaccgttttccggctgtatacgatcgttgtatgcatcttttcggctgaaacagcattctttgtgatacctaatgtcttttgaacatttttcaaagcctcacatgaagcctgatcgaatttagcacacatgtagataccaggatctacaacaggttttgtgatttcaagaaatgatttcataaaacaccccaataaaaaaggggccgaagcccctttgtaataaatttgtttttacgcttcttcgccaaaggcggcttcatcttccgcgactttttcgacttcaacggaagggatcagagcggataccgcgccaattaccgcttctggggttactggctggcttgcgtcaatacccagtaccgaacacaggtcggacagaagttgacgatgaacagagagttcactttctttttgcgcgataacttcgttcagatcgaatgcgcggcctttcagtacaagtacttcattttgcagtttttgaatatcagacattttattacccattgttaaaatttaaaagtatcgagcactttgctctttagttgtttcaaagtaccttcgttagtgatgatactatctccaggttgaggtgtcaaacctttttccgtggaatgttcatcaacaattccggtatcctttacaataaacacaaacttagcacctaagcgttttaggtatttgtattcgtgttcttgacgacagtcagtgaccagaagatggttgtattcgtcaccagtatatttattgacgaatctttccaacgtgtaacgaacccaaaccgtgttatcatacttgcatacgatatcagttccaaacacttgcatcaagcgtctgatactccagggagtatcgttactcataatcaggttatcaatatcatcaggactataaacaatattgtatccacgttctttgaggatttcaagcccgattttgaaaatatttagaacatcttcattagacatcacaagaggtttctctcgatcgcctttgtaaaaaatagcatccggatcagaatattgtccttcaatcatattgcgaatgtatggtttatcgtaaccatatcgctgcattgctattcttagcgttcttttgataccaaatgccagtgcttcacactgaacatcattgtacgcctcttgaataaatttagcaaccgtatctttaccagttcgcttttttccactaatcacataaatcattagctcattctcttttgagaagtgactacttttccgtcaatttcaacttccatatgaaggaagccaaaagttgccatacacgtaaccgcttcatcactatcgttagtataacccaattcaacctcacccaagtttgttgggaaggcaccataaaatctaaatgtggcgatcgttttcatctgggagttatccaggatatgcacagcgaatgattgcttaggatcatcccacgcaacagagttaaactcattgtaatcgtttgtgctcaacatccatatgtaaatcccaagatacgatctcatttcctcatcgactacaaagcggatcatcaaaggatcaaactcaaaagccgaaccaggtactttacctcgaaccatcatatttgcaggaatatcaactgctgggaggttcattgatggtagtgtaaccccttgaacttgtaaagtcaaacctttcatgtaactgttatcaggaatatcaacccgaaagtttgtaggtgagatttggtttaaaatcatttctgtagacataggatctcctttcctctatttagcggggaacgggatcaaagcggcctgacggggtaatataaaaatttgaagaaaatgcttgaccttttaaaatctttgatctataataattattaattaaaattttatcaaaaagatctaacaagatcaagtaaaatttaataaataatttatcaaaaaattttagatctgatcttgaattcataaattttatgatctataatatattaatattttattttatcataaatttttatgaagatcaatacttagatctaataaattttatgctttttctgaaaacttttcctttaccccgtcactaaatactggtactatgttcccatattggaaatcaggaaaaacaaaatgactcacttgaaaaaattcaaagaatttctgaccgaaggtaaaaccctcgctcgtaccgtagcacgtggtcaacgcgctaaaacttccgataaacattcaatcggttttcttcacttcaaacatggttctgatttcgaagttttagcaccggattctcacgatctggcatacttcggtaaaaacattgtacgtttgaaaggtatgactactggtaaagttcaagcggcttatgtcgattgggctaaaggtactgtttctttctacagtggcaatccggatgatgatctggatttcgacaaaccagaaaaattcaaagctgctactctgtatgaagaggcggaagaaaatctggatctgtataaccagttagcagaagatttcgaaatcgagatccctatggatgaagctctggtgaaaggtaaagtttacaaactcccaagcaacgatatgcgtcttctgtacactgggcgttctaaaactaaagcaagcggtgaatatgcagtgtttaccgtagtcgatgcttccggaaaacctcgcctggtatctggtaaaaaattcacccaggaatataaaggcgatatggtttctaaactagttctggttgaatccgaagatctgaatgaagcggctaaaggcattcgcgaaaaagttattgctgtgatggtgaaacgcgggtttaacgaaaaagatgcagaaaagatggttgacaaaaacctgaaagatgctatgaaagttagacctggtgcgacccctggcaaacttgcagaaatagttagcatcctgtaaaaataaagccccttcctttcggttggggctttttgattagtatttgctccagacttttttcgcgccgtaaggtttccctttggacataaattgctgagtcggtagccaaacagctttcgcccaatctttaggggcaatctctgctaatggtgatttgaggtgtgatggtagatatgctttgatcatttctgttgcgcctcgcatacctttcacgttaccccagttaattttaagcacggtcttgttagagaggcgtttagtggatccgtacccacgcttcaataactcttctaaaaactcctgtcgtgctctgggtggcgcatagtgcaagttcaaaccatagaacactaagttacccgctttcgatcttccggatcctaagaaaatgatcagtggaaatctatcccaatacggcagggtgtctttatattttgcatcatatgcaaacgtgtacaggcgacccgttgctggttttgccacacggtgtgttttgatactggttttgatgaaattaccaaaccattctgttgaatctttctgtcgctttgccgccgatacaccaacagtgatctttttcagactattacggaaatcgttgatgatctcgatcccgtgttttttacggtagtcattacgttttttacgggcttctgtctctgcggaacgtcgttcaatctcatcatcaatctgttttttgtaacgatgcattgactttgtgaacgttgcgtagtttaatccctcagaatcggcaaaacgtttagcagaaacacctttcgtttttgccttacggaatttgatccccagttcaacccaatcactcaatttgcgtttgggtggtgctttgggtttatcctcttccgcgatgatctcaaactcaaaaataaaactcatgtttccctccagggattactgacctcgccacccaaaaacttttttgagtgattcttctgttacgattttgaactgccagcctttttgacggcatagctcatttgcggctttccacttatcaatattaactgtataggtgtaaagagcatcaataaatttctttttattgtgtacgttgttgtttactggcttcggtggaggcatggtttctttaaggggcttaacctcccaaagatatgtagtaccattttccatttccacatagaaatccatgtaatagcgtcttctcttaccgtctgcattgcagaaatacgggatcactatacattcagaattccaacgttttacgtgtgggtttttatccagccacttcataacgtagcgctcccacgatgacctatacgtaatctttcgcggatcgcctttatacttctgtatgttttcgggtacaaacgaccctttatacgtctgtcttccagccattgcgtaaatcctaaatagaataatataacgtttagataggggaacttatcgtgctattttcatacttcccgcctgttgattacaaaggcacccagacaactgatattttccgagactatcgattttattttaatcgtgtgattggaaaatataaaacccgtagttaccagataacaggcacactacgacctgaacaacttgcagaatcattatatggaaaccagcaatactactggatcctgttgatgcttaactctgtttatgaccctttctatggttggatctccgatcaggaagccgcgtatcagtgcgctatacagcgttattctgaggttggcggtgaacaggttctgtatcacgtagatgaaaacaacaacaagtattataaccttgtcgaagaccccaataaccctggtcattggtatgacaaaggtgacaaaccaatgctgtatttacagtatcaaggtgtattagctcctgtagatatttatgaagatgcagtgttgcaaaatgaagcaaaacgaacaataaaaatcattagtccgtctgacatccaggcgtttctgaatgattttattaaagaaatggaaaaggctaactcatgaaattaggcggaaatttacactcacctttctttgatggggtggttgaaaacgttgatgatccgcgcgggttgggccgtgttcaagtccgtgtatttggacaacacccagcccaaaaacaaaaatccgatgcaatcggtgttcctgttgaagatttaccctggatgatgcctattcaggatattagaagcgctgcgatctctggtgtgggcttctctccaactggtatcactcgcggatcctttgttgttggttattggcgtgacaaatggcaccaagatggtatgataatcggtactgtcgctggtgaatatgtcgaacaaccagacacacagaaaggtttttgcgatcctatgggtgaataccctcgctatgttggtaacgatgttaactcccttgcattaggtggtttgaaaggcaaaggatcatcaagtgtcatcattcgtgattcaaacacaagcatagcagtaaacccagacgatcgcccactggatgagataccagaagataaccgccctgatacgggtggatttacgatcgaaaagatgctcaagcaggatgaggggatccgtacacgctggtatacagacagtgaaggatatccgacaatcgggatcgggcatttgcttatccgcgaaaagactcgcgacactgcaaaaattaacgctgcgatcagtaaagcggtaggtcgagaagtaacaaacgggacaatcacggcagaagaggtatcaaccttatttgctcaagatttagccaaagtaagatctgatattcagagaaccgctaacgtccgtgaagtgtatgtgaacctaaaccgtcctcgtcaaatggcgatcgaaaacatgtcgtttcaaatgggcgtcggtggtgttgctaaattcaccaataccctaaaagcgatgaaaaatgaagattggcaagcggcttataatggtcttcgaaattcactgtgggctagtcaaactccaggccgttcttctcgcgtgtctaaaatcgtcctcacgggcaaccttgaatcatatggggtgcaagtaccagatccggaagggcgctctctgagtgctgcttacgctgcgtataacggtgctacattgtcggctactagtccggaagatccgtttactcctggtgatacccgtgtgatgtttgaagaaccagcatcatcttataatgcggaatatccgtataacatggtgtttgaatcgagatccggacacattcaggaattcgatgataccccaggatacgaacgatataaccgtgttcacccagcagggagttacgaagaaattcgcccggatggaacccgcgttgttaaaatcgtaggggatgattatcagatcgtgatgcagggccggaaactcaacgttaaaggcaacttacaggtagttattgaaggcgatgcgttcatttacaacatgggtaacgttcaacaaacggttgatggtaacgtaactgaatttgttcgtggaaacgttcaacaaacggttgaaggtgagtacgttggcctgattaaaggcaatgctgaactaactgtaaacaaagatgcaacagttaacgttgatcagaatcttaccgcaaatgtgaaacagaatgcaaccgttgctgtaacagaagacgcaacggtcactgcaaaaaatgcgaaaattgagattgaagaaacgatggatatcggtgctaaagatatcaatatcaaagcaacgaataacacgtttattgattctggcgcattaacaaaaatcactggcggcacagtacaggtaggctaacatgattatggattatgaatcaataattgatggaattatgcaaaattatcagcatccttgtgatgctgagatccccgctggctattatcggcgggttatctggcaagggcatacagaaaattatccggctgttggggttgagtgggataccgagataatcaaaatcggtactcatctttatactcaagaaccattcggacatagaagcacggatctacctgttgtcaattcaccaggaacagatccaaataccggacaatcaacagggatccttgttccaaagattggctattatttcaacactcaagcagaaattgatgcttacattacatctattggtgcaactaaaatcaatggtggtaatgattggtatggcgcggatctgtcaaaatcaaacctatacaaaaaccctggcgaactggctatgtataaggtcgaaaacagtggtgggtatctttccggaacaaaccctgtatgtgatgctcgcatacgtcagacgtataatcaggacactggcgcattcaccaatattgattattattggaatggtaatcgtatagcctatatgaagcatgatgaaacaggggcgcatcaatgcaaatatacgggtatgcaggttaacaccaacgcagatacaagcattcctcctgttcctcctgcaatgccttccacttatggggcattaccgagtgaattaagccgtgctgatatttcgtgcattccggcaactgttggtttcgcatatacaaatatcagtgatgctatgttacaggcatggaacgaaacccgtaatacgttcaagctacagtttaacatgttaacgggtgctgtacagaatggattcgggatcgcgacaatgtttgatggtttatccgtatcgatggaagaagtaatggcgggggcgctcgcattgtcacagcaagcatggcaaactgctatgaaagttttcagacaagtgattagcgctgcatttaacattatcggtggtgcatggggattgattaatcagttcttgcctcaagtaaccatcttaggtgttgcgatcaacatttacgatctggtgtttggtgataattctgttcagactttgaaagatgcgtttaatgcaatcatcaaatccggacaacaaacatatgaaaccgtcataaacgcaatatacggggccataggaagcgcatacaattactctgtggaatatgtcaaagctggcgctcgcgaccttgtggatgcttgtagcgcgttatttgattggtgtttaacgatgttccaaaacggttgcgttgcattaatcgacttatacggtcggatcatgcaaacatgggctatccctccggaagtcccaaacccgttatggtctgcggtgctggctatccgtaacatcatgatgcaaatcaaaccacttgatataattctgggcggtaacttccctggattcactgcaatggatttgtatcaacaagcacaggaaaaagtcaaggcttttgttgatgagtcatacgaacagatccgagggctttatgaacaggggcaggaactttacaaaacgttaaaaaatcagattttcgaacgtgatacaattcagagaaaattcaaccagtacttaaactggatgtggggcgctgtaacagacgaagcaacagcggcttatcaatctgcattggatgctgcaaacgctgctgtagctgcaacacaggccgcgtatgactctatacaggaacagattggatctctacaagatgcaatgaaagatacatacagcatggcgatggaagaattaaagaaattgcctttgatgagtacaataaacgagtttttaggcttctgtggtgtcgcatttgacgatcttctcaagtcatatgaaaatgcgattactggtgctcagtctctgtacaaaaatttcattgatagttcgcgctcttttaaagatcactgcaaagtaatctataaccaaatttgtacgttggcgttgagtaaagtcacacaatatgtgaataaattgctgtctctcataggattagcaatcaactttggttctattagtgtatgtgttccagtactgaaatactaaatagtcgaatgatcaagaggaatttataataatggctactgctaagactaagactgtcaaaaaacagattaaccaaatccccgatatctttatcgggggtactttcgaagaaattaaaacagatctgattgattggctgggtggacaagaagagtttaaggattacgatttttccggctcgcgaatgaacgtactgatcgaccttctgtcgtatgctactctttatattcagcagatgggtaacacagctctatttgaatcgtttattcgcacggctgcattgcgtagttctgttgtacagtctgctcaagaactgggatatatgccagattcgcgcacggctgcaagtacagcagttatgattacggctgctaacccactgaccccaacatcgatccgtatcccgcgcggtacaaaattcatcggtactgtaaagaatacagacagttattcttttgttgtatcagatgacgttgttatcgttcgtgatagtaataacaactatacatcaatgctgaacctggtgcaaggccgtttagttcgtactgaactaatttatgacggttcgagtatcctgatccgagatccaaacattgaccgtagtcaggtacgtttaactgtaaacggcgcacaatgggacgactggacaaacgaaagcattgtaaacgcaacaggcgcaagcacgatttactacatgcgtgaaactgttgatggacataccgaagtttatttcggtgaaggtgaagcaagtcaacaagtggcgggtggcgcactaaccgccgaatatatcgggggcttgaaacctgctaatggttcgactatcgttattgaatatctgtcaaccgatggggaagcggctaacggtgcaaaagattttatctatgtcgatacattaaccaatattagcatcacggcgattaaagagaacccaaccaacacccctgattatgtcggtgctgatggtggtggtgacccggaagatatcgagcgtattcgagaactagcccctgttatgcgtgaaacacaacgccgttgtgtaactgcatcggattatgaatccttcctgtctcacaggtttggatctatcatccaggcggtacagtgctttactgataacgaaaaacctggttatgctttcatttctgttaaaccaaagtcaggtttacgcctaacatcggtacagaaagaagatatgcaaacgtatctttcgaaatataacctcgcgacgatcaccccgtcgattatggatcctaactatctgtatattgtgcaatctgtaaaagtaacgtatgatatcagtaagttgacggaatcagaggaatggttacgcggtcaggttatttcgtcgatcgactcttactatactgacaacgttgaaattttcaacaaatcgttcagtgtatctaagatgttgacttatgtcgatcagtctgatacttctattatcggttcggaagcagatattaaattgctccgtgaaattgacaactattacagtgctcctatgtctgggatccatttcttgaaccaggtggaatcgaaatcaatcatttccagtacgttcaagttcaccaacgaagaagacgaaagttatgttgttcgttatgcttctacggaaatggatcaggatggtaacgcaaaaattgtaataggcccgttcaaggatggggatatttcgatcgctgcttatacaggtgatgactttgaaaaattaacagatgcaggaacccgtaataaatattacgaagtaggatcggtgtctcattataccgatttcattagctttgatctgggcgttctgaacgtatccgccgatagtttcagtgctgcttatatcgagctaaccgcaaagcctctcgaagaaaccatttttactcgcgatggatcgttgatcgtgtttgaaaatgacctacgtcctcaatacaccacattgactatgaatcctatcagtcaataatcgttaacccctgtcttcggataggggtttttctttttataaatacgtgatatacataaccgcaaatttggagaaatataatgattaaagcgccttcgattacgagtttgcgcgttgataagctggctgctaacttcgtttaccttaaatgggatgatgttggcatggatttctattatgtggttgaattggcccgtagccgtgatatggacggaactattattccagacgaagagttaatctggacgcagttgggttatagctacgaaaacgaatggtttagcgatcaggttgccccaaatacacgttataaattccgtattcaaacaactcatgaagggtttgaaccttctgattgggtgatcagcgatgaattatggacgtttgatgagaacgcctacgcatatacaaccatgcgtgaattcacccctgctgattcgtttatcaatgaaaaattcgccaaaaacaatcgtgattacgtcgattttaacgatgatgttattatggcttctctgatggttgaggattttgtatactctcccctgtattctgatgtaagccagatcagcgataagatcctgaaacaagaaagctaccatgaaattcaagatcacatcgaacacgtttgtaatgatatagatcgcacgttcctggtatactcaaacggattgctttacctgtttgaacgttttcagaatatggctaaagtgtcaaatgacaaaggccaaacgtggtattactacaaagcattaaacgatcgtgtaggcaatccggtttcccgtaccgttgcttatcagagcgctaacactacgtatgtgttaggatacgatcgcatattttacgggcgcacgtcaacagatattcgttggtcttctgatgaagttcgtttttcttctgatgatgtaacgtttgcgaagctggggaaccagtcagggttagattttgatgttgattcatacaacacatatgcgcgtctaccgggaggagtgtcgaagtatgccgaagctatagcttgttctaatgaatggctctacgtggctgctaagaacgttatgcgccgtattgcgttacgtaacacaccaattgatactgatcctggttcgccgacctttggtgaacgtatttttgatgaagtttcatataccatcgtaccaggaaatgataaaattgttgttaaaaaaatggacgtgctgaatgaccgtctatacgttctggtaactggtgaagttaaaacggcgatgatggatccgactgtcaaggctaacgtgatcccatcaaacgatgctggcgtttatctgtgggatgagaatgcaaagacgtttacccgtgtttatggtaaaaccgaagatgaacgtttttatatcactcatgaatataccaatatgtcaaccaatggcgatgaagtttacatttctgttggtaactacaaatatccaggcactttgccagatccagatctggttgaaaagtatccggaagatgtgcattcagcggtgaaatacgatcttgttcctggttatactgcgagcatttcgattaactttgctacagttcgtgcaaatcagaacgatcctacagtatggaactttgggccgcaagagtactacaatgaagcaaactttagctggcatttccgcgataaggttagtacatggatcaccaatgataaccgtcctctggtggtttatccggaaaccctgtatactctggttactgatagcgcgtctcctgcgtcaacgattcgtgtaaaccatgaagtttgggacaaaggaacagttactatctacttgaataatatcaagtttactggttttacgaagtacacaaacggtgttctgttgtatcgctcaggtggtaggataattggattctatgaactgtcataccgcgcaagggatgaactcactattttctggaaacccgataacactttaatggtggcaagtctggttaatcaggaacgtgaaaacccatatacgccggatattgaacctggattaatcgaccctgatctgagtcacatgatcactcgttttgctccgcaaagctatctggacaaccaacagttcgaaaaatttggtgaatactatctgcaatacatttcgttgggaagcaacagttactataacaaattgctgaacctcatccggaacaagtatccgagagagaaaaacaacgtcgaatatttgtggtctgaaattaaccgccgtaacatttacctggataaaaccaaacgtgaggcagtggttagatttttcgaatcacgtgcaagcgatttctattcaacaaaagggattgaggcaagttatacgttcctgtttaaattgctgtataacgaagatgtttccgttgagatcgaaagctccaacagtctcgaatatgatattttggttagttcaacaaatatcagtcaggatatcgtaggccggacgatctatacaccaactggacgcgctaacgttacgtacatcgaacgtgaatatgaaaatggtcaattgcgttggtcaatgactctgcataatgctcaaggtaactttatcgaagggcaggttgtcaagtcagaaaaaaccaatttcaccggaatggtaattcgtggtgttcgcggtaaacaaatggctaacaactcgatcgactatatcaaccgtggacgatcttactatgtgatgaaaattcgttcaaatctaccgacttcccgttataaggatgacgtattgaggtttgttcatccggtaggatttggctttatgggtatcacgatgttaacagtattcatcaactctggtttgtcaatgactcataacgagacaatcattgatattctgagaaactaccgtttcgatagtggttatcctaagttctggcctgatcgcattgcgagtatggacggtaacggaaaccaacaattcgacctggttactggtgaacctctgtacaccgtacacccgcgagcgggggaaccttttgatgtacctccggaatatgacattgaagaaaaaccgcttaacggtgttcttccttctgcgcgacggttcgatcaaagtccgttgttcgattgctcaggcgttaaatattcacagttccgtaatttggtggataaacgactgaaagatgatgcaggaaacccacgtgatccaaatcctccatcacagattaaggtaggaaattaaatggcacaacaaaacttgtatcggtcggtaattactgcaaaattccgaaccgaaaacttgatgaacttcaaagatatgatcggcgatgccgccgatctaaacacgatttacatgtctattggacgaactgaatcgtggtcggataacgaatccgaccctaacttcgcccctccatatccaaatgatagcaccgatggtgttagtgatatgtggacgcatatgatcggggctactaaagttcctggtgatatgatagatgcaattttaccacgtaaagactggggtgatactcgttatccaaacccgaaaatcttttactttaacgatattgttgttgtaaacaccgcaccttataaccgtactgatccgggtaaaggttggatggtttatcgtgtggttgatgttcctgatatcggttcttgctccatttcgagcattaccggaaaacttgaatgtatcaggatcggcggtatctggagtccgtctcatgaatctagtgaacctccacgcggagaagctaacgggatcgacatgggagacggttataaatgggaatacctctacacaatcccgccagatgtcgtgatcaaccgctgtacaaatgaacatatcgtagttcctttccctggcgaactggaagaggatccggtacgttggggttatgataacgtgattcaatggtatccaggacaatacgatctagtgtatcggttgaaggtgaattcaatgcgttttcgtgcatacatggattctcttttcttcccgcaatctacgcttcctggtaacaaagggttccgtcagataagtattattgtaaacccgttgattaaaaaggcaagcccgaccgagcctgaaaagaaagcaactggtgattactataatgctaacgcgcttgaacctgattccggacgtatgatttacatggaaaacagacaacctattattcgctcccttgatcagactgaggaagtgagtattgtattcgaattctaaggaaaaacaatggcttaccaaacagcaaaaaaactaattgatgtcggtgaaatcggcaacccatcaacaggcgacccgctttatgatggtggtgttaaactgaacgaaatgatcaccaacgtttataatgcgtttggtgatgtgcgtatgctgtctgcaaacgaaggtgtcggtaacatggtgatccatgctaccggatactatcagaaactaccacgcacttactattcaagcacaccgatcgaactgggttccctgcacgacatagatacttcaacaggttcgattaccgttgttcttccttctggtaaggttggcgaaggttgctacttcataaatagtacgggtagtgtctctgttgatcgtcctatcgcgtttcgtcctcaagttggggatactatcgcgggggttgcagaccagttgtatatcacgtcaccttacacctttgtaaaaatctggtgtaccaaaaaagaaggtgcggtaacaaaatgggattattctgtagaatctatgttcggttctaaaacgatgcctgttgacactacggcgcttgtactgaaagcaaacccgactgctattcctatgttcggatatagcgaatttagcggggctaaggtgcttgtatacgcagaaaacttagctggtacagttaccaaaatggcagaagttttaatgaccgtggatcgtgtacacaaaacgatttattcaacggaatacgctattttgaaaaacagtgaagatgaaatgtttacattaaactttactgtcggtgctggtgatgtcgtatacgctaacgtgcaagcgatcaaagaagatcgaattaaattcacgattaaagcaatagatacgattaaatcagggatcgcgtcatgaaacaagaaattttaataggtcagattgtagacgatggtacaggcgattacctgcgtcgaggtggtcaaaagactaacaacaactttacagaattgtataacatgctgggggatggtgagatcccccatccagcaggtgcctggaaaacttttgcgggtacgacgctatcaccaaaatttggtgaatcatgggcgttgaataccagtgcaaacaaaatcaccgtaaacctcccgaaaggcggcgtaggcgattataacaaggttattcgtctgcgtgatgtgtggtcgcgttgggctaccaacaacgttagactgatccccgcaactggtgatactatcaaaggttccccaactcctaaagatctgtttaaagattttatggatgtggaattggtgtattgttctccgggccgttgggaatacgttgaaaacaaacagattgacaaaatcacaacttcggatctggcaacagtagcaaaagaaacgtatattgctactcagggacaaactgacttccctaacgtattcggtgttggtaatgaatacaacctgcaatcgttcgaagtttactatcgcggtaacttgctgttcatcgatgagaaagacggattcaatgctgataactcagactatggatcgattggttctgctcctggtgaactggttgcacttgatggtaattcagtacgtcttaaaaacccgtgtaacgctggtgacacgcttcaatttgttacctatctagatgggttagcaacatggcgatctagctatgaagcgtatgtgatgcgcatgtatcagactggcgatacttctctggaaaccgttcctggtgaacagtgggtaggtgatctgacaaccaaaaaagagtttacacctgctgaatttggtgtaaaccctcgcgtgttgattaaccctaactcgtttgaactgcttctcaacggtaaacaactggttaaaggcggtgacgctgactatccggcgttttcctgtgaaggtgcggaaggtgttgatgaaagtacgtgtgttggtaactctggtgtatgggttccgtcaggacaggattatagtttagtattcactgattctgtagtgacttcaatcaagtttgctcaggaactggaatccggcgacgttgtaacgatccgttggtttaacaatgatattggtactctgatggattgggaaggaactggcggtattaaagaaaaatctgataaggtttatctcaataacgaagaagaagttatattgacgaaccgtatcgaatataccgattataataacccttctcagaaaacaatgcgtaatacaggggaaacctatcaggggcgtattctggatattcaggctatgtttgatattatccacccgatcggaaccatctatgaaaacgcacataacccagcaaaccctgctgattatatgggatttggtggttggaaacgttacgcagaaggttatttcttggctggctggacatcaaatgtaacggatcctgatttcgcattaaacaataatgatttagatagtggtggtcaaccgagtcatacggcaggtggtactggtggcgatcgtggtacagaaatcaaaatcatcaacgttcctgaacttgtatcaaaagataaagttcttattgctgatgaaaatggtgctgtgatcattggtggttgtcagttagatcctgatgcttctggccctggatacactaaataccgtgaggatacattgaaagtgaatcatggtaacacattacctgataaaatcaaaactattccaccgtatatgactgcacatcgctggataagggttgcataatggcttacaaaaatatttcaaaaacaagggagggcgctcgcgtcctctctaaagaagcagattacttacagtatgatacttatggtaagttgcctctgatcggcggtaaacgttcgatcggcgaaccaaacattgaccaaacaaaacgcggtgttctgtatggaaacgtacaatccgcaattgatgacctgtatacgcttatcgagcaaatcccgattaacggcgttgttaccatgactgaggatgcccctccaatcgctgtacagcaggttgagagcgtttcttttgatggtattgtacagaacatcgattcagaccaagaacaggctgtagttcacgtgtacggctttcctttcatctttgataatgggactaacgccgcaactgtttgtgaaacggcatacaacaaatttactgaattcgttgcagcggaaaaatatttcgcagaagttaaccgcaaaggtgttgatggtacgatccttgaatgtcgatttattgatagtgttccgcacccggcaacaaatatctcagaaaacggtattcgtcaaatcggaactatcgacgtagccgcaaaaagtggctatggttcatgggttaagttgggttctggtttcttacctgatgttactccgcaagtaaccgtgtattacttcaaacgaattgcataaggataacacatgagtaacaatacaatcaaccacgtaagtgataaatccatttacgtgacatttgacccaacaggtactgattggcctgataccataaccaacgtacaagatgcgttggaaaaaataggtagttgggcgcgtactgatactgggcttcctatcgcaacaacttctgttcgtggtattgctcagatcgcaaccgaagctgatattgacgctggcacggataacactaagattgttactccgaaactgttagcatatcgtatgcagaaccctaaagcatcacaaaccgtatggggttatacgaagtattcgactgatgcggaatccacaaccgtaactaacgatgcatcgtctattactccgcgatctctgaactatgtgttcaataaccgcaaaggtacagaatcggtttggggttcttctaaaattgctaccactgcacaggcggttgctggtacagataacactgtaactatgactccgcttaaagtcaagcaagcaatcgcgtctctggttcctgttcagtcaagtgcgaccgaaagctcgcaaggtttggtacaactggcaacagttgcacaggttcaggctggtacgatccgtgaagggtatgcaatttcaccttatacgtttattcgtttaactgcaaatgaaagcaacctgggcgttattcgtattgcaacacaagcagaagcaaacgcgggtactgatgacaccaaagcgattactgcgaaaaaattaatcaatacccgtgcaactggatctcagttcggtgttgtcaaattagcaacaactgttggttatgtggcaaacactgcactttcttcaaacgctgcggtattacctagtgatcgaaatgcggtaattaacggttctctttatgagaatagcgcaatatataacaacaaatatcagacgtggacagatcttgattggcatttcccagtaggtgctattgtcatgactggttttcagactgaccacggtagtttgtatatttgtgatggtcgctcactgaataaaaataactatccgttactttttgagcgtataggttatacatttggtggtggcggtgattggtttaaccttccagattgtcgaggcgttgcagtacgtggtcatgaccgtgggcgtggactaaaccctaatcgtgggtatggtacatatgaaggcgatatgttgggctggcatgaacacccattacagcttatctaccagaacggcggtaatattcctaaatggcaagcagtttacgaactgaaaagcgccgaaaagaatgaccaaagcgctcgcgtatttgatgcttctataactaaagccactggtgtgggtggggaagaaacccgcatgaaaaacatcgcattaaactacgtaattcgtactcaatagaggttattaaatgatcatcgacaaattaaacccgttgccgaagatcccgtttgttgatggcgtcccagatgacgccacgactcaaacgaagattatttggatcaaaaacggtgaaactctggacggttcgccagataaagtgtcaaacactggtagtcttaaccgaactggtgtaaacatccagcagaacgcggttcagttagaacaaaataccatcacccataatgataaaatcaacgaagtaatcgatcaggttaacttgattactgaaaacattgatgctattggtgatgagagcgtaatcaaaaaagttaaccagttggatcaggatgttcgggcattaactttatctaacacccaaacacagaacaaggtagcacagttaaccctttctgtaaatgctcaaaacgatgaaattggtgaatacgatccagaaaaagatcctaaacaccgcacaattcgtaatgatatcatttacattaagaaagaagttggttcatatcctggatttaacgttgatggtgatgttgacccctcttctactggtactggccttaaataccgcgtactgagtaaccaacgtgctatttctatgcaggaaactcgcataaccaaactggaagatgattgggcgctttccgaagtaggacaactgacagaagaggtaaaagaacttcgtgctgaaatgggtgattctggtcttgccacaacccgatcaatctatgcgcgaatcaagatccttgaggatggttctattgtaatgcaaaatgaacttgatgcgattaatagttatatcggtcgcacgtcaggttcaaccagttccattaacgatcgtgtgaacagtctggaaaactccgttagttctctggctacacaaatcaatgatccggtaactggtatcactgcacaaattgcaaccattaacggtcaaatcggtacggcttctgctcagggtagtatccgttatgatattgcggaaactaaacgcagattgatggatatggaaatgattctgggtgaatccggcgatgatggattgcagggacaagttgcgatcttaactggtgacgttggtgaagattcagatcctaccagtatcaaaggccgtttgagtgttgttgagggtgaattacgcaccaacactagcgcactctgggaactgcaaggcgttgtaggtaactcttctagtggcctcgttgcaactagccagcagattaacaaagaaatctatggtgatggtgttagttccgatcctgttactcgcgctggtttgaaaacgacaacccgcaacctgttcactcaggtaggcgataacgcagaaggtaacgaaacgggcatttatgcactgattgccgaccttaataaacgtgttgaggatttagaagcgttgaacattgcacaggcacttgcagatcgcgtaactatcgaagatctgaatgctaaactggctctgtacatcaaagaagctgacgctgatctccgttatgagagcaaaaacccgcctctgtcattcggtactaacctaactggtgatactgaatatactactggcgacccattgtctctaagcgtaactatgactggtggcgtttctccgctgtcttatcagtggacgaagaacggcgtaaatgttggtactaatgctaacacatttaccattgattcgctacagccttctgattccggaacctacaaagtaacggtaactgatgcaagccataaagtcatcgtttctgatgaactggcgatcactgtcgcttaacgattaacaaggggcttcggccccttttgaggatctttatgattacgaacaacccagcacaattaaaagatgaaattctgcgccgcttaggtgctccgatcgtcaaaatcgaagtgacaacagatcaggtttatgactgcattcaacgagcattagacctatatgcagaatatcattacaatggatctaacaaagggtatatcattcttaccctggggccggataacccgaaaaatattttcgatctgagtaaagaacacattttcgcaattactaaagtgttgcgtactaacatgggttcccttgtatcgatggatggtactgcggtttatccgtggtttactgatttcctgatgggccttactggtggttctctgggcggtggtggttgtgcatcacgtacctacggaatgaacgcatatggcgcggatatgggctattttacccagatgatgagctatcagcggtcaatgcaagatctcctgtctccgcttccggattactggtataacgacgacacaggacagtttgcagtatacggaaccgttaaagatggtgatattgttgttatcgaagcaatgatcagatcctttgttgatgtacccagtatggtcggtaacgtctctggatacgctacagcgggttctgatggcgaagataagccaactatagcagatatatacaataacccctacaaagctgtctcaggcggtgtgaaggctggtcaaggtacaagcgttcagggttcatcctctgcgtataacaaccgttgggtgaaagattacgcaactgctcttgttaaagaggtaaacggtcaggtgctggctaagtttcagggtatgcaattgcctggtggtgttgctccggatggaacccgactgatacaggaagctatgcaagaaaaagaaaacctccgtcaagaacttctgttactgtctgatgcacttccagtgttgatgatgtaaggaggaaaaatgcaaaattgggatgaaagtctgtttgcacagttagaagatggttccggcgtcgatcggaacctaagacaagaagtaacaaacccgtatgttaactggtacaagtataaccctactcaacagttacatgattcactaacagccgaagcaattcaaatgaaatctccggatatgtattacgtccgtcgagaatttgttaatattgataaaattttgggcgaagaccgtgaatcgaagtttacaaaatcgtggaaaattgcagcatacatcgattcgtatgcaaactacgaagggcagagagacttttacagtaaattcggtatgatgtcaaacgacgaaatgacacttgtgatcaatcctcgtttatttgcacatcaaactgatggcgggatccctgttctgggagatttgatttatttccctatggataacagcctgtttgaaattacatggattgagtttgacccgttcttccagttcggcgatcgtcctcaacgtaaaatcaacctcgttaaatttatctatactggtgaagaattggatcctaaactgcaacgaaatgaagggattaacctttcccccgatgccgatctggatctcgaacctattcgaaatcttgatgggttggcggataccaatattgaacaatacgaagaagatcaagcctttgaagatgaaggtgatgaattcattgaatcgtttgatgttgttaacgggcgcggatcaccgttcgcacagttcccataaatataaccaggggaaaccctatacatgtagggtataggagaaatcttatacccgctttaacccatacaggaaaaagaaaatgtttggctactggtataatagttcgctgcgaaattatattgtcttgatgggttgtcttttcaatcacgtgcaagttaaacgcgttcgcggcgaacaagaaaaatttatcaaggttccgattacctacgcatcaaaagaaaaattcctggcatccatgaacaagctgaactatgcatacagtcaggaaaatgttgctaaaacggaaacaattttaccacgtatgaatctatccctcgttgatttgcagtataacgcaattcgtaaaacgggtatcgcggtaaaccaaaaaatgacgcagttacgcgcacctggaaaaacagtaacgcagtttaaccctgctccgtatcgtctcatgttcgaactgggagtgtatacccgttacgaagatgatgtgtttcagattatcgaacaaatactgccatacttccagccgcatttcaactgtcgtattacagaattacataaaaacgacattaaaatagaccgagatattaaaatatctctgcaatctgtttcccctgatacatcatttgaaggtgatgcaacgacacggcgacacattgaatggtctttaatgtttgaattacagggctacctatatccgcctgttaacgagattaaaggcgagatcagaacagtatacacggatttcttttccaatatgaacccgttggacaaagataattttgaatccgttgatgctcaggtggatccggttgatatgcctatacaggattacacgggagaagaatacattcaaacgtatgctaatgatatcccaattcctagcggtgatcaacctcctaaaccgaggggccaataatggaagaatttagcgtaaaacaactacttgatcttgaaaatctccctggtgctgaaactggggaagaaatggttgtatatgaaaaactcgaactcgttgatgtcgagtcacacccagcagatcgaaaacctgatttagaggaagactatgcacttgcgcgtaaaaccgcgcattacatgaatcagatgatcatggatatggcacaaattgccttgcataacgctaaaaactctgaatctccgagacacgttgaagtttttacaaccctgatgaatcagttaaacaattctaaccagggattgatgaaaattcataaagaaatgcgagaaattaccgaagaaacaacaaaaccaggatctgaaaaaggtaatggcggcggtaatgaaatgaacatagagaatgcaactgtatttgttggttcccctacggaattaatgcagaaatatggtagtgcatacgaaccaaaagaaggcttcattaatggtgaagcggtagaggtaaaccctgatggaaatggaaccgacgatcgatccgagtaaggaatcagatcacccaatcggattaatgcatcccgattatctgaaaaagaaaattgatgaatttgggatggagtggacgcaaagcgaacatgataaaaaatggtatccgacaaagtttagcgattacctaaaaattaacggtatccataaagttgatattcaagcaaaagacagttcaaactttgcgacgtataaaaacaaaggaaacaagaaaactcgatataacggaaacccaaacctgaaacgcgcgtacatccaaacgaaatggacgcaacagatgttgatggagtgggttaaatgtcgtgatgatattgtttattttgctgaaacatattgcgcgatcacccacattgactatggtacaattaaggttcagttgcgtgactatcagcgcgaaatgctgatcgaaatgcataaaaaccgtatggttgcctgtaacctgtctcgccagttgggtaaaacaaccgttgttgctatcttccttgcacactttgtgtgtttcaacgaggataaatatgttggcgttttggctcataaagcctctatgtctgcggaagttctggatcgtacaaaacaggcgattgaacttctccccgatttcttgcaacctggtatcgttgaatggaacaaaggttctattgaacttgataacaaatgtaaaattggtgcgtttgcatcttctcccgatgcggtgcgtggtaactccttcgcaatgatctacattgacgaatgtgcgtttattccaaactttattgatgcgtggttagcgattcagccagtaatttcttctggtcgtaaatcgaaaatccttatcacaacgacacctaacgggcttaaccacttctatgatatctggaacgctgctatagaaggaaaatccggcttcgtaccatacacggcgatctggacatcggttaaagagcgtttgtatacagacggtgatgatggcgtatttgatgacggctattcatggtcttcgaagatgatcgccagttcaagtaaagaagcatttttacaggaacattgtgctgaattcatgggaaccaacggaaccctgatcgctggctggaaattgtcaaaactctcatgggttgatactgatgaaacggaaactaatttttatcagtataaagctcctgtagagggacataaatatattgcggtactcgacccagccgaagggcgcggtcaggactatcacgcgatgcatattatagatattacatctatgccgtttgaacaggttgctgtatatcattcaaacaaaacatcgcaccttattttgcctgatgtcctgttacgttatcttatgatgtacaacgaagcatgggtttatatcgagctaaatagcacaggccactcagtggctaaatctttgttttctgagttggattacgataacgttatttgtgatagctataatgatttggggatgaaacaaagtaaacgatcgaaagcgattggatgctcaaccctaaaagacttgatagagaaagataaactcatcataaataacaaaaagacaatacttgaatttcgtactttctcagaaaaaggtgtttcgtgggctgcggaagaaggtttccatgacgatctcgttatggcgctggtttgctttgcatggctaacaacacaaatgaaattcgcagaattttgcgagaaagacgatttgcggttggcaaatgaggtattcgcacgtgagcgcgaactgctttatgaagatatgttatgtcctgttatcgtaacgagtggcgacgaaacaatatctgtcggccaacacggtatttcgtttatataaatttagaggaaacttaataatggctttaatctctccaggcattgaaactaaagaaacatcggtacaatctaccgttgttcgaaattcaactggtcgtgctgctattgttggtaaattttcatgggggccagcttaccagatccgtcagatttctaacgaagtcgaactggtaaactattttggctccccagacaatgacaccgctgattatttcatgaacgctgtaaactttttacagttcggtcaggatctgcgtgttgttcgtgtcgtcgataaagaagccgcaaaaaacgcaaccgcgatctataatcagatcaaaaccacgatcaccgctgctggttctaactatgcagtagacgatcagatcaaagttaaacacaataacgttgttattgaagaagatggtgttgttaccagcgttgatgatcagggtaaagtcctgtctgtgttcattccgagcactaagatcatcgcacacgctaaacaggttggtgtatatccggatctgtctagtggctggactacagaaatcgtttccagttcttctggtgtttctgctacgattacaatcgacggcgtagaagttgatccgggtattactctgctcaaccttgacaccgcaaaagaaactattcaggcaactgctttccagaaactttgcaccaaatacaagctaccgtctgttattgcaatttatcctggcgaaatgggtagcaccgtaacggttgaaattctgtctaaagctgcatacgattcttcggctgtcattaagtcttatccttctggtaagtctggtaaaaacagcggtcgcagttcgatgaactttggccctcagaatgataaccaatacgcgtttatcgttcgccgtggtggtattatccaagaaacgtttatcgtgtcaaccgctaaaggtgataaagatatctacggttcaacgatctacatggatgatttctttgcaaacggtggttcgcagtatctgtatggtacgtccctaaactggcctgtcggattctccggcgttctggaactgggcggcggtacttctgcaaactccactgtaggcgctgatgaactcatggctggttgggatatgttcgcagatcgtgaatctctgcatgttcctctgctgattgctggtgcttgtgctggcgaaactgccgaaatttcgtctactgtacagaaacacgctgtgtctatcggtgaaacccgttcagattgcgttgtattcgtttctccgccgcgttctgctctggttaatatcccactggctcaggccgttgataacctcgtagaatggcgtacaggctacaaaatcggtaatactaccccagttgataacaacatgaacgtaagttcaagttatgcgttcatcgacggtaactataagttccagtatgataaatacaacgatgttaaccgttggatcccgctcgcgggtgatatggctggcctctgtgtttataccgatcaggtatcgcaaccgtggatgtctccggctggctacaaccgtggtcaactgcgtaactgcatcaaactggctatcgaaccgactaacgcgcatcgcgattctatgtaccaggtacagattaacgcggttactggtttctctggtggtgctggatacattctgtacggtgataaaaccgcaacgactgttccaagcccgtttgaccgtatcaacgttcgtcgcttgttcaacatgatcaagaaagacattggcgataacgcaaaatataaactgtttgagaataacgatgatttcactcgttcttccttccgtatggatgcaggacagtatatgtctaacgttcgcgctctgggcggtgtatacgattaccgtgtggtttgtgacactacgaacaacacgccggatgttattgatcgcaatgagtttattgcatcaatctacgtcaaaccagcacgttctatcaactacatcacactgaacttcgtagcaacctcaactggtgcggatttcgatgagttgattggatcaacgtcagtataacatgtaaggggctgaaaagcccctataaatacacatagaggttagaaaatgcttactgatattgtacgcgcctttgaatccggtgatttcgcacgtccgaacctgttcgaagtagagatcccgtacctgggcaaaaactttaaattaaaatgtaaagccgctactatgccagcgtctaccgttgaaaaagttccggtaggttacatgaaccgcaaaattaacgttgctggtgaccgtacctatgatgactggacaatcacggtatataacgacgatgcacacacaacccgtgatgcaatcgtagcatggtcaaacatgctgcatggtatgggtgaagacattacaggggatatccctgcaaactacaaaaaaaccgctacggttaaacagaaaaaccgtaacgacgaagtaaccgccgaacataccatttatggcctgttcccgaccaacgtgggagaggttactttagactgggatagcaacaacgaagtgagcacttttgagtgtactttcgcgctagactggtgggtttaaacgctataaatacaggggtagcaataccccttatcattatttttcggagttgtaaatgaacttttttggattagacaatgtgttagggtttttcaaaaatttcgccaaacaggatgaaatggaatttgaagcccaattaaaagatgatacaggttcgattgcgcctccgaaaaataacgatggggcgcacgaaatcgaaacggacttatcaaaccagcgttattcttctgtgttccaacagttctattccggacaggatccgcgaattcagaacaaaacacagctaataaatacataccgtggtatcatgacatatccggaagtggaaaacgctgtttctgaaatcattaacgaagcgattgttaatgaacaaggaaaagatattgttacgatggatcttactaaaacgaattttagtaaaaatatccaagataagatcatggaagaactcgataccgtaatgaatattcacgatttcgataaccgaggatctcgtttattccgtgattggtatgttgattcgcgtatctatttccataaaatcatgcacaaaaatgaagctgacggcatcaaagaattgcgccagttagatccccgttgcatggaactgatccgagaatcggttacagaaaccctacccggtggggttaaaattttccgtggctatcgtgaatacttcgtatacaccgcaccgaaaaacggttatagctacaacggacagatttatagtcacaatgacaaggtaaaaattcctcgctctgcgattgtttacgctcatagcggccttgaagattgcgacaacaacattataggctacctgcaccgcgctgtcaagccagctaaccagttgcgtttgctggaagatgctatggtgatttaccgcattacccgtgcgcctgaacgtcgtgtgttctatatcgacgtaggtcagatgggtggccctaaagctacacagtacgtaaataacattgcacagggcttaaaaaaccgtgttgtatatgacgcgagcactggtaaagttaagaatcagcaaaataacctgtcaatgacagaggactattggctgatgcgtcgtgatggtaaagcagttaccgaagtttcaacgcttcccggtggcactgccttctctgatatcgacgatgttaaatggtttaaccgtaagctgtatgaagcgttacgtattccgttaagccgtatgcctcgcgatgatggcggtatccagttgggtaacgatggcggtattacccgcgacgaattgaactttagcaaatttattcgcgaattgcaaattcaattcaaccctgttcttgcggatccgttaaaaactaacttgatcgcgaagaaaatcattacagaagatgaatgggatgaaaacgtaagtaagattgcttttgtatatcagcaagattcttactattccgaaatcaaagatattgagattttggaacgccgtttaaacctgatgggccaacttgaaggggtggtcggcaaatatatctcccataaatacgtaatgaaagaagttctccggatgtctgatgaggaaattcaaagcgaagccaaacagatagaagaagaatcaaaagaagaacgttttaaaaatccagaagcggaagaggaaaacttttgatgaaagaatttatcgaagcaatcaaaagcggtaatctggtggaagctaaaaaaactttttactccatcatggaagaccgcacagaagcgcttcgtcacgaattacgcgttgaacttgccgaagctgtacgcatcgaaggcgaagaagacaaagaaaaagacgacgaaggcgctgataaagatgacgaaaagggcgataaaaagccagccgaggatgataaatccgataaagatgatgagtgaggtgtgtaaatgcaacttgacatcgaaatcaccgccgaagatctccaggaacatttagacgaagcgaaagcccgtgtagatattctgggtatcgatgaaggcacggttaaaatcatcgaaaatttggcggtcaccgaaccaaatttagcccttgctatgatggcggttgttgaaggtttaacacttgatgaggtaattgtcaagcatgttgattcccgtggcaacgtagaacgcctcaaagacaggaaaacccgtgagcgtaatgcgtatcagactaccggattaactaaatcccaacgtcgccagatcgcgcgtcgtgctctcaaaacaaaacgtgctaacccgtcaattgctactcgcgcacaacgtaagcgcaagaaagcattgcgtaaacgtgctgcactggggctataaatatgaatgaatcccaaatcaacgaaaacggcgatatgcttttaatcgaagaatggggtttaccttgcggtgacgtttcagaatctattttagaatctgttggggaatcaaaagacggtaaattgcggatcgaaggtattttccttcaagccgaaaaggttaaccgtaaccgtcgtttgtatcctaaaaacgtacttgaagaagcagttaacgattatattagaactcaagttaacacccgtcaagcattaggtgaaatgaatcaccctccgcgcccgaatgtggatccgcgaaatgcttgcatcctgattgaaaaattgtggtggaagggtaacgatgtttggggccgcgctgttgttgttgaaggcgacggtggtgatggtgacaaactggcggcgttgattcgtgctggttgggttcctggtgtttcttcccgtggattaggtaagctctccgattccggcaaaggctacggcgttgtacaaaagggctttaaattagctgtaggcgttgatgtcgtctgggggccaagcgcacctgatgcatatgttaagcctatagtggaaaatcagcaaagcaaaccgcttgttgagaataatagtgctgatgacgcttttctggcattgtccgagcgtttgaaaggtctataaatacattaaacaaaacaacaggaaaatcaaaaatgcttaaagaacaactgctggcggaagcccagaacctggatactccggtcgagttagacagcattttcgaatcagttgaactttctgatgacgtgaaagcgacattcaccactgtattcgaacaagctgtaaaagctggcgctgcaaaactcgctgaatcccacattacccagatcgcggaacgttccgacgaactggtcgaagctcaggtaactgaacgtgccgctgaaatcgaaactaagctgtacgaagatgctgataaatattttgcgcacatttccgaagaatggctgaaagaaaacaaagaagccgtttcccgtgacatcaaagccgacctgtttgaatccctgatcatgggcctcaaagaagttctggttgaacataacgttgtcattccggaagaacaggttgatgtagtcgccgaactggaagacgaactgactgagaatcagcaggaagttaaaaccctgtttgaagcgaatcaggaactgaccaaagaaatttcagaaatgaaacgcaatgcagtagtttcagagaaaactaaaggtttgaccgaatctcaggtcgaaaaagtagaatctctgattgaagggctggaatattccgcaaccttcgaaaataaactcagcgcaattgttgaaatggtagcaaccaaagctgaaaaacccgttgacgagtctgtaaatactccgcaaacgaaagatgactttgttccggtagtcgaaagtgttccggcagagaaatccaagatcaataaatatgtacaagcggcaaaagccctttcttaatttcaaaaggtaagaaacaatgtctaagaaaaacgaattgatggaaaaatggaacgatcttctggagtctcaggaaggcttaccggatatcgctaccaaatccaaaaaacaactgattgctgccattatggaagcacaggaaaaagacgcagaagttgatccggtttaccgcgacgagaaaatcgttgaatccttcggtggtttcctggcggaagctgaaattgctggtgaccacggttacgacgcaaccaaaatcgcttctggtaactcaagcggtgctatcaccaacatcggccctgctgtaatcggtatggttcgccgtgcgattcctaacctgatcgcgttcgatatctgcggtgttcagcctatgactggccctactggtcaggtgttcgctctccgcgcagtgtacggtaaagatccgctggcttccggtgctaaagaagcattccatccgatgttctccccggatagcatgtactccggtcagggcgcggctccgagcaacggctttaccaaactgacttctgctcaggctattgctgacggcgctattgtgttccacgatttcgttgaaactggtcgtgtgttcctccagaacgtttctggcgctccggttactgtaactggttctaccgacgatgctctggatgctgctgttatcgccgaacaggaaaaaggtactctggctgaaatttcttacggtatggctaccagtgtagcagaactgcaagaacagttcaacggttctactagcaacccgtggaacgaaatgggcttccgtatcgataagcaggttatcgaagcacgtagccgccaactgaaagcacagtactctgtagaactggctcaggatctccgcgctgttcacggtatggacgctgacgccgaactgtctgctattctggcaaccgaaatcatgctggaaatcaaccgcgaaatcgttgacatgatcaactataccgcacaggttggtaaaactggtttcactcagaccgttggctctaaagctggtgcgtttgacttccaggatccgattgatgttcgtggcgctcgttgggctggtgaaagctacaaagctctgctgattcagatcgacaaagaagcaaacgaaatcgcacgtcaaactggtcgtggtgctggtaacttcatcatcgcttcccgtaacgtggtttccgctctggctcgtatcgatagcggtatcactccggcaggtcaaggtctccagaagactctgaacgttgacaccactaaagcagtattcgctggtgttctgggtggcgtgtacaaagtatacatcgaccagtatgcacgtggtgattacttcaccgtgggttacaaaggcgataacgaaatggatgctggtatctactacgctccgtatgttgcgctgaccccgctgcgtggttctgatccgaagaacttccagccagtaatgggcttcaaaactcgttacggtgtaggtatcaacccgtttgcgaactctcgctctcaggctccgtccgaccgtatcacttctggtatgattaccaaagaaatgttcggtaaaaacgcatacttccgccgcgtgtatgtgaaaggcttataagttattgaaaaataacgatattaaagggaaccttcgggttccctttttcatttctataaatagtgaaaacaattgaggctatattatgaaacatattatctacaaaataacaaatttggttaataataaaatttatgttggtgctcattcaacagaagacatcaacgattcatacatgggttcaggggtggctataaaggcggctcagaggaagtatggtatcgataaatttataaaagaaatattacatatttttgatacccgtgaagaaatgtatgaaaaagaaagagagattgttaatctagaatttgttaataatccacatacatataatatgggtatcggtggtgatggtggccctatgttgggtatgtttcattcagaagagaagaaacaagaaatttccaagattactaaagagagaatgacagatgaagtaaaatctcgtctctctaaacttaaaaagggtaaaccacagtccaaagaatccaacaggaagcgctcagagacgttaaaagctaaatatatgaatggacgtatagacagagagtataaacctctcacagaagcgcacaaggcgaaattaggccgttctgtatcgatagatggagttgtatactcatccggatcggaggcggcaaaatcccttagtatgtcccactctggtttaaaatatcggattaatagcgacaaataccctacctggaaatttgttgcataaataccattatacactttacgcaggaacataaaatgagtgaaaaattttacacaattaacaagctggtgcgtcagtcacagctaccgcctggcctgtctaaaaaggttcttgatgaggcaaccggaacagaaacaattaacgtagctaatacccgtccggatctggtatctcttacccgtgcggtaaacaacctgatctacggtgaacttgtagcaattcaggaaactaatttgcctaccgcaaccctgtttggtgtgcgttatcgtaaccctaaaggcgatattacgttttccagcgctgctacctattccggtaagtatgcaagccgtgataacattccagttggtgcggttggtactgcctataccaaaggccaagtttttaaacatccgacaagcgatgtcgtatacgaagcaactgatagcgtaactctcgcaggtgctgatattgatgaagcaattatggtcgcagtattcagcaataaattacgcctggcaagcgaagccgcgccaacaagtcagtatgaaaccagcgaagatattagcacaacttctttcgaaatggatcgttggaatatcaacgttcgttcccgtaaattcaaaactgaaatgaccgtggaacttatgcaggatctggaagcaaaccaattcaacgcagaaaatgtgattgaagatgttctgggtactgttgccagcgaagaagtaaacaaagatatcatccagactctgatcaacgtatcacatcgttacaacgttgatggtgtggtaacaaatggcattttcgatgctacaaccgcatacactgcaaaggatgctccggctttaggtcgtttcctgtatcaattagtgtgtgaaatggggcaggaaatgaatagaacgacttcatttgaagctacctatgtcctggcctcttctcgcgttgtaagcgttctgtctgcgtctggttggatgcatgaaactgatgaaacccacccgttagcaacaggtcgacttaaaaacggttactatgtctatactgacaccaatacaccgtttgattacctgctgactggttgcaagtacgatctgggtgaaatggatcatgttggctctctgttctatacgccatacacagaagctgatcaggcaggttcgatcaagatttctgttgatcctcaatccttgcagcctaaagttgctattctgatgcgctacggtttatcggttaacccgtataccactgctgctaatgaaagacttgtgaaaggtgatgactgggtaaacctctcaggtaaatctaagatgagtcagattgtgggtatcaaacttcctaaactgggttgatagtattataacccaacggggataatattcaataggtggagtagggaaacttactccatcttttaataattataattaatattaaattagatcttgaatttataaatgatttatgataaaatttattaattataattattatagatcaaataatttttgaaatcaagtaaaaataaatttgattttataaattagattatgtataattattcttttaataatatattatattagatcaatttaaatttgactacaaattaatatagtatattatagatcaactgggtaaattggtgagtatgttatgagtttgaaattagaagatctgcaaaatgaacttgaaaaggatatgctgatagatcccctcaagttgcaatcagaatcagcggatatccctaagatttgggctaaatggcttcgttaccattcaaacgcgaagaaaaaactgatccaacttcatgctaaaaaagaagctgatgtgaaggatcgtatgttgtactacaccggaagacatgacaaagaaatgtgcgaagtggtgtatactgggactactgaaatcaaaatcgcgatcgctggggatccgaagattgtagaaaccaacaagctgatccagtattatgacatggtggtagatttcaccagcaaagcactggatatcgtcaaaaacaaaggatactctatcaaaaacatgttagagatccgtaaattagaaagtggtgcataatgtctactgaaaatgaaaaatgtgtagtgtgcaagtgtccggttccttctactggttttgtgactgaatccgggcgcgtgtgtagtactatctgtgctgactacatcgcagaaaaaacaaaaaacggcgagatcaacgaatccgatgatctgaatgaagttcaaatgttgctgtaggtacaatatgaaaaattattcgaacattgattttaatgaagttaatcatcttcttgatttgatggaaggttgctataatgaaatcaaggcaatccgcaaatcatgggaaatcgggtatggagaaggctaacatgaaagaaattgatttgggtatttttgatgaacgtccagatcttttagaatctgacgaacatcctgatttttaataatcataaatagtattgtagtagggcaagggcatgtttatcgatggatgcatttccataatcgaataaaccttatggcctatatagaatgcaatatatatccgtgattgagatttatctcaacctggaacctttaagctaacagtgtgcaacggcacggactactataactttagtacccgaaaggggcttgataaaagaatgctggatgataggcgtactcttttgcgccgtccgatggagtttaccttcggcggggtgattgataacataccttcgatcaagggcatgagtaaaaaagccagaatagtacctcactggctataatcaaatgtacgtgttgggctgattgcgtcccaaaattaaaaagccccttcctttcggttggggcttcttttttagaacttttcttcttctccgctttctagttcggcctttaattcttcggctcgacctttcagcgcatcgcgcatagaaatatcgtctgacggcgcaacatcaacttcttttacacgatttttgtaatatttttcaagctctttaaggccgtccatagtacggcaagaggcgaccttgctcatgaaatcatcaatagccgcctcataaagtcgaaaatcgttgaaactcttcattttaacctctaaatttcgatttgtttgatcacgtagtcaaacttttcttcattgtaaatgcgtactcgttcgattgcgtgtttcataccatagtttttgtatgaatatttatttttagcatttttggactttgccagcgttgctaagttatcaaccaaatcccaaacagtagcaagagatttagaatcatgtttacgcagtacgcgcccaattgactgtttgactataacagcagatttgcaaggatgtccgaagatgatgtgatgcaggttcttgacagaaatacctgtactcagtacaccaatagaaccgattacgatcagccccttcgttgattccgcgatccgtttcatttcgtttcgctcatcaatccccgtttccccagaaatgtatacaacgttgtcatatacctttttgagttgctcatacagccatttaccatgtttgatctgattgaacatcacaaacacgttttcatctttttcccttgccagtttcaacgccagcttacagatccatgcgttacgcctggtatgcgatgttatatacttgatttcgctttggtaatcagcccccttcattttcttaatctcatcctctttatatctcatgaagatggtattaattcgaaggttggtaacttgaccttcctgcatcaaccgatttgtatcaactggcttgaagatttgaccaaaagcgccaatgtattgcatcatgtttgctttgccttctttcagagaaccagaaaggccaaacttgaaaatacactgatccattgtgttgatgatcttctgtatgctttgtccggttgatttgtggcattcatccaccatcaaacacatgaactgctgaaaccactcaggaggcattttaacagccgattgccacgtagacacgtagatcaatgcattactgtttttagcagttcctgaacgtattccaagcattgcctcgcgaggtaaaaggcgatagttgacaatatcaccgatcatctgatcaacaagggcggttgttgggacaatgattagtactttgcctgtgtaattttccagacaccaacgagatatcaacccctgaataagagatttacccgctgacgttgggaggttaagcacagcacggcggtttttaatcgcatggaacaccgattgtttttgataccaatacggatcaatttgcttgtttccgtcgtatactgggtgttcttctaaccacttgtcaaaatctggctgggtaatttcttctgtttcgtggatcttaggatccatccagatagaatacccgcgagactccgcgaattttgttacaagataggctaaaccgtagggcagtttcccgttatagtccatcaagtatatgtagccgttccatccaccatatttgtattttgcctggtactgataacctggcggctggaagctgaaatagtcgcgcaattcatagactatgttagcctctgcctgaatctgcacatgactagtgttaaggaatttgacttcgatatccactatgtgtatcctatatacggtttatatgaatatttataggctaaataatgataaacattggagaactacaatgagtattgattacgaaaaggttgaaggtttcaaagccttagaacaaaaagaagccaaattacagcttgctacctacgcgcaagaaacgtttgatgtcaaactgaaccgtcagaagtcattcgaaaatatgcttgctgatctggaagctgccgtaccggaagaaaaaccggaactgttgatcgactcccctgatccggaaattgttacatacgaaggtgaaccatctgttcctgatgttgctccggaaattgccgaccagattgaaattgttcccgacgctctacaagctcctacaagcgattctgagacggtttctgatgaactggcatggatggaagggtttaccccgtctatcatcatgatgggccgctctgtttcgaatactggcttttatacgtgtccgtattggatctatgattggatgaaacaaaatccggattggtataagcaccctgatggttgtcctcattattcagcgcgtcaaaccctcaagtcactggcatggtacatgcaccgtgatgggatggttactgtacgcgaaaccagaaatagccagttcgacacgttcaaaaaataattttaaaaagtagttgaccttaccctgctgttcgagtatatttgtattcgaaggcgggggaatggctctcgcagtgaagaaggaaatacaaaatgaacatgatgaaaaatgcttactacccagttctgtttgtttggactaatggtgaagttaagaaaatcgtcaattctaaagctccttattacactgtaggtgaagcacttcgccacgctgcggaagcaaattatcctgttcatgccgaacctggttatgctcgttggaacggttctaaatgggttgctgatacctgggacaactacgaagaagaaagaatggagtgtgatcctgattacgtatctcgtcaaatggaagctcatatgattgcagatcgtagactggataatgaagctcgcggattctattgattaacaaggggctacggccccttttcttttaggtgaaatatgaacttaaatcacgaatgtttaaaagatttgagcgatggtaacgagattggtaacgttatttttcttgatatcgatggcgttctaaataatatgcggtgcatgaaatttggtgaacatatggacatcgaatgcgcacgacacttacgccggatagtgaatcacgctaattgtgatatcgtcatttcctctacgtggagaatcggcaacagtacccataatctacgtgaaatattttatccgtggggattgtatcggatcattggtaaaacttgcactaacttccctcatagtactggaatgcgtggtgatgaaatcaaggcatggatcgatactttcggatgtaaaaactatctcattcttgatgatgataccgatatgctttcttcacaaaaagaacattttattaaaactgatgggtttgttgggttgaccgaagaacaatccacttatgcgatccgtaacattttcggggttactactccgttttgtcctgaatgcaatgggtatggacgtgttaacggctacgacaaatgcggaacgtgtaacggtaaaatactccggctataaataccaataaacataagaggctaaatttatggcaattccttctgtaacaattagcgccaacaaaaacgaacttttgattggcgaaactttgaccttagaggttgaaactactgaactagatcctggtgatgtgtttctggcctatcgttggcaaaaagacggtgtagatattccaggcgcaaccgccgatacttacacaactacggttgacggtacaactgctggcgattataccctgatcttaaaacacggtgctgatgaagaatcagcaacagaaaccacgtctgatacaatcaccgtgaccacttattctgatgatcttgtttctaaatggacggttcacccgattccgtggcgtgataccagctttaccccgatcggttattgggtacttgatgaaattctgtatcaaaaagcacagggtaaagattggaaaactgattatgctgattacaagtatagtgaggaagtacaaacgatcctgaaagcgttcatggaaaacggtgaatgtgatatccaggattcacgaaacggctatattcataaaatgagtgaaatctaagaggctttaaatggcaactgaaaaatggactacggttcatcctattccgtggagaaataccagttttacatatcttccatactggctatacgatattatcgttgatgcttttgagaaaggcgacgactggcgcgattatgcggaagaaaaatataaattagagtttgatactctgaaagaggcgtttgaagattatggtgatattcatgtaatcgaatctcgtaatggtaaactggttagtctgttgtcattgactcctgctcctgaaccagatcctgaccaataaaataaggcaaacaatgaatacacttctttttgatttcgacgacactttagcagaattttctcaggctttttatgataagttcggtgtacgtccggaaggaacgccaaaggaacgatatgatgaaatggcggcttctttggtgcgtactgatttttataaaaaccttccccgtattcaggctgggattgacctccttcaatggagtttccaacgccgaatcggtgatcctgctactttgctgcttcgcgcggaagcggtcagccctctttgggttatgaaagaaaaactgaactatacagataagatttgcgctgaactggggatccatcgtctcgattttagtcgcattgactatccggaacagttcgcagaacatgcctatcgtggtgttctgatttcccgcaaccagaaacatcttgaaatctggaacaattctcatctagctaataaagttcctggtattttccttgcggaaaccctggaagaaaatattcagctagtcacggaagcgcttgcaaaggctaatcaataacaaaaaagggaaccgcaatggttccctttcttttacaatctttttaattcatcaagcgctgttttcttatcaccaacaaagaggattgctttacctcctgcttttctgaaaggcaacaccgcttttgcccgatcgtcaaacagaattcctttaccagcgaatgctgctttttcatggctacttttaacgtagtggaattctggaacgtaacccaatactttttgcaatgctttacgtttttgttcggcaacaccgtcagaattgaatttaccaacactggttagtattgctacatcaccaagtgttcttaaatgatggaataattcaaatccttctttgattggttccagattttcgtagaaatcagttttggcaatttttgctttgcactttttcaactcatcttctgtcatcatagagggttcgccatacattggcacaaatgaaccttcccagtcgaacaatacaccatccatatcaaagaaaaacttattcatatcaattcctcagtttgtgtatgcatactataatgtttaatcattaatgtcaaccccaagtgtcagttttcggtgcgtatgctgcaactttagccacaatttccttatccagttcagctacagatttctgaggcttaccacgggctttaactttgatgtagtttgacttaacaacaaacatccctttgttacttgatttcttgatctcgctatcaacaccaactttgttaaagctgatccaaatgtcgccgtccatatactgtttaagagaatcacccatgttcaggatcttcgccatagtaagggccgcgccttcgtgggtatccatgagaatttctttaggaactacacgatcgcgtttctggttctgctgcatagcaatatgcacatcgttcataacccatacgatatgtacgttttcttttttgtatcccagcgtttcgacatcacgcgcgatgcttgccagcttgctcatgccttttaacgttacgtcaaagatgaggttaggtttacgatcttctggtgctgccataataccggaataaacacggttttggtttttgttggaaatgttgaaaacgtcggcgatcacatgatggagggtagatacgttttctgggtttttgaggttcattgttttgacatcatgacccgtttgtttcttgatctctgctgcgagtttatcgctacccattacaagttttttcagggcgtcaacgtccagggtaataccttcgatgcctagcagtttttccagtgtgaaccctttacctgaaccagcaccgccagcaagaataacaacctgaccgaacttaggataagcacggcctccgaaggtgatcagcgcttcggttaaggtgctttctgtgaattgtttaaatgacttcatgtaaaattctccagtttattttctattatttattgacatgctttctgacagtggtgtatggttatggtgttcgacggataggccggaagaactttaaaccataaggtatatgatatgaaaatcaatttacatcgcttcattgtagaattttcccgcaaccgtgacatggactcttacaactattactcccgtgagattgaagatctttttgcggctcacgttggattccttcgccaccatacccctaaaatgcgtcctgaccacgatccgatatatagccctattacatggcaagcccctatcgatggttacgttgaagggatccggatcatgacgtttaacgcgatgtatggaaacgcgttgatccatatcgcacgtgagaaaagggccgaattccctaacggatggcgtattgatgaagtgattcaaaaccttatgcagttacgacgtgaatacaaagcgggtatgtgtctgcgtaatgaacagtatcagatgtataaaacgtatgcatatatctctaagcacctaattaattccatgttttacatcgttggtaatcatggttccgctatagatatcggttcttatgaaatcgtggcttatgctcgcgaacaaggaaaggccgctgcactgaaaatcattgagtctggtgctatcattcttaaccatcgcattgatactattgcttactatggtgatcaggttgaggttgaaggcgtacaccatgaacgattcaacaaagccgtatttactaaaaatggttatgcgtatggtaatgacattataacttctgcggttcctttcgttcgtctaactgttgaaggatttggagaaaggttgccttataaaccgtcagaagctcaaatgtgcgcggctgctgaaagaatagccagaaagcggaaaatgtataccgatgaatacctggcgtatgtcaacaaaacaaaagaagatgtagaccgagaaatttcttgcatggatttatccatttgatataatgtaagcatctttttaagggaggatacatgaaaacgatacattgcagaaatgaaaacgttgtttattatcacggttcgtgtactgctgctggtattgaaagcatgttattgcctccctgtgattctgatactctgtctgaaaagggcagaaagaaaaatttagaccgtgttttctttaccgctgatatcgggttagctcgtatatatgctggaagggccgcacgttctataggtggggatcctgttctgtacagggttgtgtgtccggttgatgttgtatgcatgaacgaagacaaaggcgcgagcgtttaccatgcagcatgggcgttttgtgaggaattatgaatgataaagtgttggcgtatctcgttttcttgctgggatatcgcttagaagtgatgggcgcgtattcatcaatgtatggtgatttaacggctatctggatggtcgggttaggggttgcttttacattcctttcctttgcaattgttaatgaatcggaaaaggatattgtatgaaactatatcatgtgatctactctggtgttttaggcattgacaaacaaatgttagttgatgtaatgtgtaaaaaactcgatgaacgaattggaaccagatacaaaaatcatgtatcggaaagtgttttcatcaacgttgaccatccaaatgacatggaagaaatggtcaatactcttgatgatcagcagatcccgtttgttgacaatttcaacatgagcgctggagtgtatacggtagtaacttttgttctaaaaaatgttgacagccgaaacgatagcgtgttgaatgtagttgcaaaaatcgattctaccaaaggaaaataatatgaaaattgtacaccgtagcatttccgaactgtctcaagccgaaaaagtgcaaatccatttcaaattcaatgatttgcgtaaaggttatgccgaaattgcccgtgaacatgggttagataacggcgatatttaccaggtagtacaggaaattgaacgtatccgcgcgttccgttctgcaaatctacctgttaaaaatgcaatgcgccgcgaagcgatcgaaatccatcgtaagcgtgtgtacaatttagaacgtgctaaacgtccgatgaagaaagaaaagaaacctcgcccgtttaaacgcgaacatcttaacacctctatggcgctggcgtttcaagatgcggggattatctgatgcgtaaatctgcgatggatcgttgggctagtattgctacttcaaacgtaaaaccaaatcaagccgctcctgatgtagaagcggttcgtaaagcaaaagaacctgagattgtggcccttagccccgaactcattgagcatcgccgccgtgcgtctgctattgaactggatctgcgtattgcgcgttcatacaatctcaagcatgaacacgccgcaaagaacaaccattcttttgaccttactctggaagattggaaagtattgatgacaactgaacgttgtcagtattcaggcaagatgtttagcaataaacccggtagcccgtatgcccgtacaatggaacgtattaatccacgtctgggatatacacaagaaaatacaatagcggttatcaatgctgctaatgctgaaaaatcaaatctagatgcattcgttaagggtgatgtcattctggatgaagtaaaagtgaagttgctgcgtaaagcactttatcaagtcgaaaaacgtgtgaaaatgaaaggttaaattatgtttaagaaatattcttctctgactaaccattatgaaggtaagttcatcaatggtgtaattatgaacgggcttactggcggtgtgtgggttgcgcgtgaaaagatccacggtgctaactttagctttatcaccgatgacggcgttaccgttacccccgcaaagcgtactgatgttgtgaagccagccgaagatttttatggctgttcagcagtagttgcaaagtattcaccagggatccgtaagatgtgggaaaccctcaaaaagaccggaacttatgatgatttggttattcaagtctacggtgaatttgcggggcgcggtgtacagaaagatgttgattacggcgaaaaagatttctacgtattcgatatccgtgtaaatggtgaattccttccggataacctgtgctcgcttatctctcgatctcatggcctgaaaatggccccgctgttgggatacggtacttttgaagagatcaaagaactgccgatcacgtttgaatctgtggtgaataaagcaaatagcggcattggtagcgataacacagtatatggcgaattcgtatatcctatcatggacgttgaagagggcaacattgcagaaggttttgtaatgaaacctgtttcacctgcttttatgccaaacggtgaacgcgttgcaatcaaatgcaaaacaaccaaattcactgagaagaaagcgaagaaagcaacccgctttaatgctccggtttcattgtcagaaaaagacaaaaaccaactcgatgagtttgtttgttaccttacagagaaccgtgtgaaaaacgttctttcgaaactggatctggcttcgatcactgctaaagatttcggtcgcattatgggcttaactgttcaggatgctatcgaagaaatcagccgtaatcacgggcctttcctcgaacagttcgaagacccagcaatggctaagaagctgtttgtaaccgaagcccaaaacatgattcgccctgtatggggcaaaatcctgaaccatgaattttaatcagattctggttgatgcaaaagcggctaccctgatcggtagccgtaaacctcctgaacgtatcgcaaacattgctgttaaaatcggacgtgctttgaacgaacgcgggatcagggcttattctggcggcgctcctggtatggatagtcattttctgtttgactataatccggataacagatgtataatccttcctgagaacggttttaacggccttttcgcaaacggaaaggatatcatcgactttcaagatttaaacacacagaaagccgctgacgaagccagaaaggtagcaggtaacttcgatacacagaatgaatacgttcaaagaaggtatgcacgaaacacgattcaagttcttcgtgaaaatcttgacaatccaactgattttgttttattttgggcggaagaacgtgaaggatgtgttaaaggtggaaccgcgatcgctgtaagattggctaggttgtacagggttccatgtttcaatctcttcaaagaaagtgtattgaacgatgtgtgtgatacgttagggatcaatatcaaacccccaacgttggattttttatggtaattgaacatgcgcccttacttcgtgaaacatacgaaagatgggctgttaataacgcaataggtgaaaatatgattcatgtacgtagtatcggtactgacggcgaaactccggtagaaggccgatcacccactctcgcagaacgagcaagagaaattatcaacgatcagaatactaagatgatcgaacatgcgcgggatacaatcacaaaaggtgttctgaaacacgcgacaaaacaaaaccttatctatgatatgaagcacgatatcggctcttgtctgggtattgaatgtactcgctatgcattccaacgagtttctgaatggttggaagaagaagggctaaaattcgatacagaagaaaaacgcaacgccgctaagatcacaaattctctggctagtaagtacaatcaaacgtatcgaaaccaggaagaacgcgaagttttcggtttcaacattcctgaaaggaaaacagatcgccgtgtaagtgaattcactttttacattagttggtaaaaaggtgttgacgggggttggttatagtagtattctaactcccgtagacaagacactaactcaaaaggataaacatcatggaaatcgtaatgaaagcaacttatgctggatattgcctggaagcaaaaggtgttgctaacaacggtaaaggattacgggccaatgttgaagcaatgctggatgaattacatgcaatgtacgaatacgacaacgtagcgggtagcgttcttatccaggcgttggaagttgatggtgttgattgtgctggttggtgggatgcttacattgactacaacgataaccgggtttacctgttgagcaacaaagattatttctaaggaaccactatgagcgatgaagctgaggctttagaagattgggctgattttgatgacgaagaagacggtgaatatttctgcgttaatcgtggtgcttataaagaccgtttagaactccgtaaacttttatcgggttcctctcaaatatcaggatccaaacgaaaaagtagtaaacaaaaagttcagtatagtgatggttctgtacgtgatgaaactgttgttgctgaattccgtggtcgggttatcacaaaagaaagacaaattgatgtaaagaacttgtatgaagtggctaaggctgctaaaataggttctgtgattgtttgtcctgtgtgcaaagaaaaacacacaaagacaacgtatcacaaagttttctgttcgaatggcagaaaaaccagtaaggattgtaagtctaaatatcacaatacaatccatcccgaacgactggatcgggtattttaaaataaacctaaaacgtggagtacgtttatgaacaacaaaactttcgaagaactgaacagcatcatcacttccgtagattcctataaggtttctcactggtcgcaatatccaactggctccgaagaggcgctgttttatattgaatctcgtggtggtaaatttgatcaagtagttacggctggctgtaaccgccttgcgcaaatcctatcacgtccggtgactatggaaaacgtagattttgctaatcggttgtacaaaatgcactttgggcgcgaaatcttcaactacaaaggttggaaagaaattgctgaactgggttacatccctcttgaattcagagcgattccggaaggaactccagtagcggttaaaaatccggttgcaactttccacgctgggaaaaatgcgctgtggttagcaggacacgtagaaaccctggcgatcaggggagtatggttcccttcaaccgtagcaactctatcccgcgaatgtaaaaaagtgttgaagaaatatctcaagaaaacctctgatctcgaaggcgaagcatttgatatggtgttacgtacccgtttgcatgacttcggcgcacgtggaacttcttctgctgaatccgctggtattggtggcctcgcgcacctgtataacttcctcggtactgataccgtagaagcgctgattatggctatctctctgtttgaagattgtcagaaagcgtttgatgatggtgaaatggcggctggtatttcaattcctgctcgcgaacattccactaccgtttcttacggcaaagaaaacgaagaccttgcgtacaaaaacagtattgagatcttcggcgaagggatgtatgcatgtgtgtatgattcctgggattttaaagcggcggttcgccgtatcgcagaatataaagattcgattctttctaagggcggtactctggtagttcgtccggattctggtgatatggtagacaatatcatgtacgctcttgaagaactgggtcgtatctttggctatacagtgaactcaaaagggtataaagtactacacccagcagtaaggatcattcaaggcgatgaaattcatggccctgaaacaatcaatcgggtgttgaactggatggagtctaaccgttgggcgtctgaaaacatcgcgtttggtatgggcggcggattgcttcaagaagttacccgcgacactcaaaaatatgcgatgaaaatgtgcgcaatcaaaattaacggtgtgtggactggtgtgtataaatgtccaaaaggcgctgaatggaaaaagagtaaaaaagggttgttgatgactatcactgatggtgttaactttaaaaccattgatactctggaacagaaagtgccggaaggctggaaagatgctatgatcacatactatgtcaacggaaagattacttcccgtgacactttagaggaaattaggaaccgtgccgggatttagtatccgcaaaaacaacaaaggaaccgtgattttctatgacaacattccccttgtagctcgcaaggggctttttgctaaaatcgctgggtattcctttaaactggaagaagtcaacgacgaaacactaaaagagatcgtaagaattgccttacaattaagaggtaagaaagacgaacagaaagctattgacatgatcaataaattgggtgaaactcaatgctttatagtgaatcgtggttacaagtacgataccattgcaaaatttgaaaaagggctttgtgaattatgagttattatggtgtgatcccatacacaggaaacaagcaatcgctattacctgaactattcaagctgttccccgaaagaagttcatacatgcgtttcattgattgtttttgcggtggccttagtgtgtcgctaaacgtccctaaacccgttctaagcaacgattatgataagacgctgattgatatgtatgagcgtcttaaaacgcttcctgacctgtctccggtgcgagaattgattgcatcgaaggggctggggaaagacaataaagaagagtatctgaaattccgtgatgaatacaaccagaacaaagatcctttatggctctatgtcctgatcctgcattcattcagcaacgttaaccggacaaacgacaaaggcgattttaacgctgctgtaggaaaacgaaccctcaactttatgacagaaaaacgtttcgaacatttcaaaaagaatgtgacaggaattgaatttcgttctggttcatactctgatattgaaatcaacgataacgattttgtttattgcgatcctccgtatctgatcactgatgcggtgtataacaaattctggaacgcagatcacgaacgcgagttatatgctttccttgactccctgcatgagcggggtatcaagtttggtttatcaaacgtgacacatcatgcaggaaagcaaaatgatatcctgatcgagtggatgcaaaaatataatgtgcataacctcgataaaaagtatctgttaggccagcatactgattcttacgaacaaaataaaacgcaagaagtctacgtgtgtaactaccagaaacgcgacgtaaatacataccctgaaacactggatgacttaatgtaaggtaacatatgtttaagatttttggttatatcccttctgtttataattgcgctccatgcctgaattctaaacgtctcctggacgcaaaacgaaaagaatatgagtttgtttctgtagccgatgaaaaagacgcagacggcaaaccgatcctgaatgaaacggtcatttctgaactcgaaagcctgttaggtactcgtagactgaccatgccccaaattttccacgatggtaagcacatcggcggctttgaccaactgcgtgagtacgttcgcacgttgggataaatattaacacctttatttgattggtgttattatgctcactaaacgtattactaagaaagattatccatccattaaacaagctctttttgaacagcaaaacggcttgtgcgcgttatgtggtcgccctttagagggtgaccttgaaaaacatcaccttgaccatgatcatgctctatctggctctaatgccggacgtgtgcgcggcctcctatgtaacctatgcaacggtacagaaggtattgtaaagcacaaatttaatcgttctggtctggtttcccgtgatgttgattacatcgaatggctagaaagcctgcttgcatatctgaaacaagattattccgaaaatcgtattcatgacaaattcataccagataaggtaaaatggttttcaagacttaccaaacctgatatgattgccgaaatggtttctatgggcttcgagtacgccgacaaagacgaacgcaaagccttaaccgcaaaatatagaaagcaattaatgaaggcaacgaaatgaaatatctaaacgctcgattatcaacgcaacagaagaaaaagctgatgatgttgatatcctccactgacaaaaagatcatatctctacatgattggatgcttggaaggggtgactctgatttgtgttatgtcaaaccgaaagaccgaacgatgtttgatgatcgcggtcgcacattgactaatttttctcctatcaccgttattgatatgtgggaactccttgagattgtaggacgggatatacctgttgacggggttgaactgatcaaatatcttaacgagattggacacaatttagatattatccataaggcaacgaaatgaaagtagaaaaacgcgacggcaaaaccgtcgatttcgatcaagaaaaaattcgcaatgctgtgtataaagctggcggtacgatgacggatgctgatgccgcaatcatgctggttcagtacaatcagatccgcgatggtagcgcaatgaagatcgcccgtatccaggaactcgttgaagaatccctgatgaaaacgaacccagcggtcgcccgtgcatacatcgaatatcgccacgatcgcgatattgcccgtgagcagaaaagtaaactgttcaaagatatctccggcatggtgaatctgtccaacaaagagatcaccaacgaaaacgcgaacaaagacgcaagggtattcccgacacagcgcgatttgctggcgggtattgtggcgaagcatttcgcccgtaatcatatccttccgaaacacatcgtagaagcgcatgattccggtgacatccattatcacgatctggattacagcccgttcaccccttacactaactgctgtctggttgacctgaaaggtatgcttgagaatggtttcaaaatgggtaacgcggatatcgaaccgcccaaatcaatcggtgttgctactgctcttatggctcagatcaccgcacagattgcttctcaccagtacggcgggacaacctttgctaacgtcgataaggtgttagcgccttatgtagaaatgacatatgaaaagcatgttaaggatgctaagaagtataaaatttcgttagaccgtacatatgcaatggaaaagactgaaaaggatgtgtttgatgctttccaatcgtatgaatacgaagttaacacgctgcatactgccaacggacaaacaccttttgtcacaatcactttcggtatgggtactggttggcgcgaacgcatgatccagaaagcgattctgaaaaaccgtattcgtggactgggtaaagagggtatcactcctgtatttccaaaactggttatgtttatggaaaaaggaattaaccttaatccggaagacagaaactatgatattaagaaattggccctggaatgttcttcaaagcgtatgtatccggatattattagcgcggctaataaccgtcgtattactggttctagcgttcctgtatctcctatgggttgtcgtagtttccttagcgtgtggaatgatgagcacggtaatgaaattcttgatggacgtaataacctgggcgttgtgacgatcaaccttcctcgtattgcgattgaagccgaagcacaggaagatgaagacgcgcatgatgcattttggcgtatccttgatgaacgtctggaactgtgttttgaagccctgatgactcgtattgatagtctcagaggtgttaaagccagtgtagccccgatcctttatacagaaggtgcgtttggtgtacggttgaaacccgatgatgaaattctggaactgttcaaaaatgggcgtagttctatcagtctgggatacatcggattgcatgaaactctgatgcttttcggatctggacaacacccattcgaccggatcggttctcagaacatgggtagactgattctggaatatctacgcgctgcgaccgaagcatggaaaaagaaaaccggatttgggtttagtctgtactcaacccctgctgaatctctatgtcatcgtttctgcaaactggactatgagaaattcggaagtatcaaagggatcacagataaaggctggtacactaacagttttcatctggacgttgaccgcaaggtaacaccgttcgagaaaatcgactatgaagccgattatcattacattgcaactgctggacatatcagctatgtagaattccctgatatgaaaaacaacctggaagcccttgaaaaagtctgggattatgcaatggataaactggactacttcggaactaaccttccggttgataaatgctttgaatgtggctctgatgatgaatttaagccaacagaagacggttttcattgtacccattgtgggaaccatgatccggaaaaaatgagcgtcacgcgccgtacatgcggctatttgggtgctcctgctgtccgtgggttcaacgaaggtaagaacaaagaaatgatgcatcgcattaagcatcaaaattaatcaaaaagcccttgacttcggttgagggcttttgttatattgggcctatcgaaaaaggagacagattatgaaactgactaagaaaatgaccgatgtagtagcatgtgcgtttgcattaggctacaaagttgaaaatcatccaactcgcgttgaagtcatcaaccctatcaagggccgtcctggtttggttctgtgtgaagacggcacagcatatcgtaatgatgtctctttagaactgacaactactatccgcaccgcaaaacaaatgaaagatgttcttattagcggcgcaaaattgagggatttatgatgtattggacaaaagataaatttgtttttcgtgatgatacgtgctttgggactgcataccgaaacttggctattcgtggcggttcgttttcggctaatgatttgtctaaggtagtatttcctattaaagttactgagtatgacgtattcggtgttaaagggtttactgattactttggtacaaagtttgaatcagaatcttacatttttactaatagcgatcgtgaattattcaaaaaacacgttgttgttaaagagaaaccgttattaccaaaagaggatgaagcaaaggaaatctatgatctcctgaacatgcttgacaatctcggtacttgtcatctgttcggtaaacgcgcccgtaaagcgaaagatgttctcaacttgttgcgctctcgccggaattacctgatccgggaagctgaacgcaatctgaaaaattcagaaaaacaggctgaaatccataaatccacccttgcgaaactaaaggctttgtgatgtttccgttatacgctaaagtgcgtcgaaatgtcggtaattcatatcaggaatggagtgaatggctacgcgaaacgaagtcattctacatttcaaaagccactgatatgaaaggccgtaacattcgctatcgtaaacccagtggtaaacgagtgaatgggatagattacattgttcttgattcgattcgggatgatatacgataatttaactttgaggcaatattatgattttcaacaaaacaaattcacgtaatttgaactatctacgctgtgaactggaagctaacgaaattgaactgtttttctgtggggctacagatccggaacacaaattgcattgggtatccggtgagattgtaagcctaaccgatcagattgtcgaagaggctacccgccgcgatgcaatcgttaaaattggtgctgttgatgtgaactacgaaggacatccttcatttttcattcaatattatccataaaagtattgacctgtatatctgaatgtagtaacatccttcttgtcaactaaggaggatgttatgaaaatcaaaaacactgctactgaaactctttgcaacgaaattgcagaaatgtactggagtaaaggtcacttagaggctatgaaagagtttcaaaagtggtgtgatacccaaaagttagctaaatgggaatacatcgttattgttgaacggatcaaagaactgatcctcgtgaagaaaggtaacatgaaatgattcaactgaaattagacacaaatgcggtgttaagcctgtttccggaaggttcaaccgcccgcgtagacctccaatctgctatcatcaaaaacgtggtgaatagcgtagttggtaagcgtgttagcgaagaaatcaacaaacggatccaggaacagttagctgttctaatgccgaactcatccgaaattacacagatcatcaaatctgaattctcggattacgtcgaaaaacgttatggttattcgaatgttttcgatgtcaactatggcaatgttcgcgaactgtctggtaaaatcaaagaatcggtaaaacagcaatgccaaaccattcttaaagatatcgagaaagaggcgattgctcatgcaacagaaaacattattgcagacgaagccgcgtttatcgctcgcgtctcgaataacctggaagttactgtacgcaaagcagtaatgcaacgggttaacactcagttcccagacattattgacgaagcgatcagagaacgtctgtttggtgaaaaagcatgaattacgaccgcatctataatatggatgtggtcaacggaaaagggatccgtgttgttttgtttgtgactggttgcaatcataaatgcgaaggttgttataacaaatcgacgtggaatccttgcaacggaacaccgtacacggaagagacagaaaaccatctgatttctctgttgagtaatccgcatgttgatggacttacattaactggcggcgatccgctttaccgtgacaactatcctactatcctaaaactgcttgagcgcgtttctaaggaacttccaaagaaaaacgtatggttatggacaggatataccctggaggctttacaggccgacccagaacgttctaagctacttccttacattgatgttctgattgatggtaagtatgaaaaagatttgccaacgaaaaagccgtttcgcggttcagataatcaacgtatgatcgaattcgctaaaaattcgatagaaattaaaaatattgcttgacctaatgtgtaactatggtaatcttaccacatcgtaaatgacgattaactttaattgagagataatatcatgatcctgaatttcaaaacccgtaaagaagcacgtaactattgctggaagtggaacattcccctgaaaaccatccgtaatacagggcgcggttcttgcccgtggacagttcaagcaaatgaactgaaaacgttcgtggttggtaaaacttacaaactggttgaccgtgaagggtttactaccaattcacatggcggatctaacatagcaaacactatccaggcgaagcagatcgaaaaattcctgaataacgaggtaaaaattatctcgaaaacccattcagatactttcaaaattgatcatcctcctgaaatgacttatatctctctgcgttcgtgggaagctcgttatttcgtcgaagttggcgcggctccagctaagaaaaagaaagccaaaccgaaaaaagccaacgttacggctccggttgcgcctgttgcaccagcaaccgcagatcttgatcaaatgcttgatggcggttcggcaatgtcggttgaactggatccgactaaatttgttgaaggccgttcgtatgttctggttaaaccgcagcaatttaaaaatcgttgtggcgctaaccctgggatcaaatcatataccgatgaacatagtaatggtatatacaccgtttaccatacgaattcgctcggtcatcatcaattgagcaaaacggtagaaaccattgattccccgaccggaattgttggttactatctgcttgattctgaacgttcgttcttccgtgaactggcaaccggaactgttgatgaacctgttagcgtttccggtaatagcgctatcgctatcaatgtagacgaagcggctaagaaagaagaaatcgcaaaagcaatggtacagcttgaagaagcggttaaagcccatgaggacgcgcttcaaaatctgcgtactgcttccgacctggttcgcaaagctgctcgaaaagtagcagaagtaagcaagtaaattaaactgggtgctccggcacccttttttatgaggtgacacatggaattattagaaggtaaatcttataccctgaacatcgacgctaaagaatttgcagaaaaaacctggcgaaatgctttagctgaattgatcaaaaacaacggctatattacaatcgatcgtattgcgattggggatactgaggacattgcttatgttctgcaagatgatttcgaatatgagatccctagccatatctggaaatacttcaaaccatatgatttaccggaagaagaaccgaagattgctactaaagaagaaatcgccgcgcctgatttaaatttcgtatcttccgatcctaaaatgtggatgactgtaaaacctgttcaacaagatatcaatgatctgcgatttgattatccttttgtcaagcggatcacttcgatttctgtactatcagcgccgacggattcacaggcacttgaatttgcattacagcatgttttcggtgataataagctgtacgcgattgacaaggaagctgctattgatgaacagaaaaaggaaatcatcaaccttctttctctgcatcaacaacttgaagcggtggaattgattgagcgtatgctttctgatacaaagaaagatatcattagcaaaatcactccggcacgaaggaaagcaattgatgaaaatcgagatttacggtattcccgaatcgcttcataaatgttatggttgtattgaagctcggaaattacttgatgagcatggattagaatacgaattttattctgttctaaagccagcaaataacagtgtggggtttgattacgatagaccccgcattgaagagttagcgaaacgtgttcgtagtcgaagcatggcatttacttaccctcggatctttgtagatggtaattttattggcggttatatgcaattgaaagagtatttgggtgaagcatgaataaagaatacattcgcaaagtagcaaacgctattcacgcaacaacgattgattttctggaagggtttgatcatattatccatcctgaaacgctggatagttgggaagccaaactgtttaaaagtatcaatgaacagtttccggaaaaggttaagcgctggtttatcagacaggaaatcgtagcaacgatccttaatgaacgtggtgttgaggcgttcggtgtaacccctctatataagcgaaaccagattacagacgaaacaatcaagaaatataaaaagatggttcggaagtaataaataatcagttaaatggccttcgggccattttttgtatataaatattggtattgaatacaatataggaaaaaagataatggtagctaaatcattccgcgcacgaagtggccttgatgctgctggtgaaaaagttatcaacgttgggaaggctgatcgtaatacgctgagtgacggcgttaacgttgactttttcaatgaatttaacggaatccagcagtatgacccgacccgtggctattctcaagacatggcgatcatttatgcgcgtcgtatctggtacgcaaaacagaatattgcttcccctgctggggctttcgacgaatccaaatggatcgcaactcgtaatgacccgaaatgggtttatagtaacgtaaccactccagacggtagcattattgaatctggtagttacattatggctgatggacgctttactgaacttctgtacctgctgccggacaacccgacagagggcgacgtaatcacgtttaaagattgcggtggtttagtaggtgtgaacagtatccttgttaagtctaacacccgtcagatccgtttacgtactgtacaatcagcacagtatcgactgacccacccgtacatgatcgcaacgtttatctataacggtaacgtatggcgtgttgctgaaactctggataaccgcgattctgagatcgtgaacgcaaccggaacaggttcattccagttacaatctggcatgacagttttccgtaacagtgctacaggtaaaatcactctccagttgccgaaatatgcaaatgatggtgatgtgatcacaacctatgacgctgataaaatgaactctatcaacgtagccgttttgcagatttatccaggtagtggacacactatttctgacggcgcaattactggtgttacttctgtaactagccagaaatccggctttggtatgttcatctttgatgcacagaatagccaatggaaagtatatgatgctgataaccgtgttcgtctgcgtcgtatctatagtgatttaaacgcagttcctaacgattacgtttttgttactgcaaacccttctgggactataccaaacgttacagttacccttccaactgatgttgctgatggtgatcgcgtttacgtatccctttatatgatgggtaaaaaccagaactgcacaatcaaagttaaagatggtacaacggacaagatccgcaccaacaaaaatatgatgcagttcccgcagcgcaaagactatccgcctgatgattggtttagtgtaacttcattagcatttaatgctgctagtgattacctcccgtatatcgagttttcttacatgaaagctacgaaagaatgggttgttgctaattatcgtccgatcgttgaacgtgttgacgcaactaacagatcgcgtactggtgttattgctctggctgcacaggcagaagtaaacaaaaacttggaagacaacccgaacgacgaaactgctattactccaatgacgttagcaaataaaactgctacagaaacccgtcgtggtattgcacggttagcaacaactgctgaggttaacaaactttcaaccgatacctatctggatgatgtgattgttacccctaagaagctgaacgaaagaacagcgactgaaacccgtcgtggattggcagaaatcgcaactcaggcagaaacaaacggaagcaccgatgatattacgattgtaaccccgaaaaagttgcataaccgtattgcatcgccgaccttaactggtatacttgcccttgttgctacaggtggtgctcctaacaccaacacggatcgtgctcaggctggtactggggtttatgatcattcagattatcagaaagcggtaacgcctaaaactcttcgtgagtataaagcgactcagttacaatctggcgctgtatggctggcttctgaaaccgaagttattaatggtactgttgcaagtgcaaacatcccgaccgtagttactccggaaatgctgcacaagaaaacctctactgatggtcgtattggtttgatcgagattgcaactcagacagaaacaaacgctggtactgattacacgcgagcggtaacgcctaaaacgcttaacgatcgtgctgcaacggaaacgctgacaggtatcattgcaattgcaaccactgccgaagtatcagcgggtactgtaactaataaagcgatcgtaccgtctaaactgaaaggttatctggacgatacaagccatattactgttgctactgctgacgggttaactcaatctgggactatttggactacggttaacatcggtattcaatcagcaactgaaactcaacgtggtactttacgcgttgctacgcagtctgagacgaacgcagggacattagatacagtatttgttacccctaagaagttacacgctaagaaagcgactgagagcgcagaaggtatcattcaggtggctacggctgctgaaactactgctggcaccgtcacaaacaaggctgtttctcctaagaacttgaaaaatacaattcaggttgatacttcatggcaagctaccgatctggtacgcggtactgtgaaactgtctaaggggcttggtacttggtctggtaatgatgtggctggttctactcttccggatgatggttatgccgctgtaggtgttgctgtttctccttatgaattgaacctgacgctgaaacattatctgccgatcggggctaaagcggttgatgctgataagctggataacctggattcttcccagttcattcgtcgtgatgttgatcagacggtcaacggggcgttgactctaacgagaacaaccactgtacaggccaacattgattcaagcgctgatgcaacattccgcgtaatgaatgttaatggagatctgaacgttggtgatggttcgtcaatgggtaaacttcgtttgaatggtggttcatctaacgactggtcaattcaagcaagttcagcctctgggcgtattgcaatgatctcaacgggtaacactagcacagttcatctttctgtgtataatgatactcgcggcgttgtagctaacgttaaattccaggctcctgaaattcaggcgattagcaaagtgactctgggtaatgataccgtgatcactgctgctggttctgttctatctatgggtacgaacaacaagacaactaagatcctgacctctgatgctggcaacatcgtagcggaagaatctgcgaactcttataaagtctttactgagaagaacgcgcaaaccttgcttaaccctacgtatgtacgcaaagcaggtgatacgatgtctggacggttgacagtaaacaacagttcaattatcatcgcaggtcaagcggcttggtcaacgctggatgcagtaacagaagcatctaggggcaactggacggctgagatcacagcatcggcacaatacaacttgcttcctggttatgcggttccggttcttgaaccagatccgattaatccagaaatcatgattgtgacccgttatacctatgttaaagcaccgggtactttaacgcagtttggtaacggaactgcattcacttatcagatttgggcacctcgtccgacctctggtactggtgttgatgcgctggcgcaatccttctggatccgtcaaatgaacccaatcacgggtaaatttgatggttggggccgcatgtatactagcaacaacccgcctactgctggtgagattggtgcaacgtctgctgttggtactacggttaaaaacatgactgttaccgattggatcaaagttggtaacgttaagatttacccagatccagttactcagacagttaaatttgagtgggtggcataatgtcaaacttaatggcggggttcggccccgattttgtagaaacgcaaattctatcggaaacaaacagcgtaacttacagaataaccgcaaaggcaacacatcccaatgcggttcctaatcagtatgagtttacactaaatcaaaaggcggtagggacaccgcctagtgttgggatcaacgtatggagaattaacaatgctgtagttgatccaattaaaaccttcacattatcgaatgataattcagcaactgcaaacaaagcgtttgttgaatatatggatgctcaaccttctgggctgtatttgataatgactaacggtgaatacaaaacaagccaaatcgttgatgattggtttgctaaaaacagatccgttatgtggcaaggcgctgatttcgctcagagattcccaaattctgcatatgttgcattgtatggggcttcaaaatctcgtatactgattgaatcgttttacgcgaacgatggagttttaaaagaagattcacgcgcatcaatcgatcttgtctatgataacgttggtgatgttgggcgaactggtgtacctttcagatctgttgaagatacggaagaatacaattcaaccaatggatctgaatataaagtatatcctgttgcaaacccagtgatctctaaactagctgattacggtatggctcctggattggctatgatgattactggtgatttttacgccagtaaagcattattggatgctggatcaacaacaagggttactgttcgatggtttacgggtactgctcaaacttcatcatcggtgattgaagttcctgcaaataaacctgatgagtggttacgatttgaacagttctatacgatccctagtggttgtgatggatttaacgttgctgtatctcgttatcctaaacccgctacggatagtttatctgcgatccgtaacttcgtgatggttcaggtatctgctgccgaagctgatcaaaactttgctgcacagtttggggttaacggtatcagaatgaacaacatgattgatggtggaacaccgtatatatttgaattgccgaatactaaggtttatcctggtggcgattattctgcttccgaattccgtgaagttgatgcataaacaaaggctcggatcatcgggccttataaatatgtaaaaaggggttattatggcagatttaaaagctggttctacagtcgggggtttacctatttggcactccggcacatttccgctggttccggttggtaatactctaacctatcgcggatataaggtttatactgaaaacgataaaccgcaagcatcaaataacgacttcgtttctaaagaaagcggtggtcaatatttgggtgtagttgcctttaaacaggggctacaaattaacgctactttcacaggcggaagtgaccagaacggtttatattctggtaatggtgatggcgcgggattatcaaaagccaacattgatcttgtatcatggtatggtattggtattcgttcatcttatggtactaatggtcgcgtattagtcatcaacgctcgaaatggtgatttaaacactcagggtaatattacggttgaaaagcaaatcagtattacaaccgctaaccctactgacgcaagtcatgcaacacgaaaaagttatgttgatggacagataaataatgtcacaacaaatgctaatagcagggtattacgcgctggcgatacaatgacagggctattaactgccccgcaattcgcgagcacaggcgcggcttcccgtcccgaacacgtaccacggctcgaccaggtaattactaaagggactatcatagattttggatcttattaaggtgaaacatggctgatttagaaaaaattcaattcctacgtagcacagttgcggggaaaacacctactacaagtcagcttgcagatggtgaactggcgatcaacatggctgattatgccatttacacgaaaaatggttcttcgatcgttcagttagcgggtaaaggtatcccagaaacaaataccaaaaaattaacagttgatgggcctagtgctcttaatgataccgttaccgtagcggaaggtaaaactattactttcaccaacgagaatttaagtggtgaaataactcgtcatatcgtcggtaaatgtgccagcaatgatggatggtacatcggttccggtggtacaagcaataacggcattcttgaaatcggtactattgacgatggtactgaaacaatccagtttgtacaacgcggtgctggtaacgtagaagccagaaaattagtcttacttgatagctctggtaatactactcttcctggggatttaagattatccactaataaaaccgttaaaattagtaatggaagcactcttacgttagaaatgggtgtaggagctaacgatgtctatattaaaaacttgagaggctcgggtgttcttcaattaactaatgatggtaatctgtcgttcagaaattaccaggtttattatgccatgagtggaaaaggccctggtaaagatggtactcttctgactaatgtagaaaacgcgcgtcagcttgagcaagataatttccctatatcttcaggcaccgaagctcggtggactaaagttgctcttttaaaagacccaggggcaaaccagagtcgcctgcaactgatggtgactaacggcggtaactatggttctacgcgtggatctatcgactttatcgattgtagcgctagaaactttccatccactttaacaagcgctaatattcgtaatcatctacaggttcgtcgaatcggtgatcctggaattgataacactaaccaaatgcgttatagtctggttcgtacctctgagggtttagaactgtggtttatgcaacgcgcattcattagtagtgttaaagttgctctgctgtctatcgctggttatactgagtattatctgcctactggttacacaacttctgcaactgctccggaaggtttagttgagagtgtggctattcgtatctatgacgaaatgaataaacctaaccttgacaatggtactgatggtattctgtctattgctaaaggtggtacaggtgcaagtacagcggatgctgctcgtacaaacttagggttgggtactgctgcaacccgtgatgtcggcgaaggtgctggtaatgttttagaaaatggcgcttatggcttaggcggtaatggtggtaaatccatcaatgacattatctctaatgcggatatgttgacccgcttaaaatcatacggcggtactttctggcgtggtgttactaaatctggtgttagcgttcaaaatggcctttataaccatggctctggtatttttatgaatgctggcgacaccatgtcagccattaatatcgactatgctagtgctaaagttcgtgtatacgcggctaacaacgcggctcttgccgcaggagatgtcaaatacaacgaactttacggtacagcaaataaaccaactccggatgacgtaggggctgttgctcgtgctggcgacaccatgaccggtaacttgactattaaagctaacttaaaggtcgaaaatcctaatggaacgatggttgatttaggttcagagaactcagacaagtacagcagattaacccttgcacgtaaaattggtagcggtgctaccgtagcaatgcttaaagttactcctgaaggacacgtgcaatttggttatcaagatgcagttgctactccagctcctagtaaatatattctagttaaatccagcggtcttgaggtagaaggggatttagtttttaatcagacctatcgcggcaccgaagaggcagttgatattactgataagactgttgaccttaatggtcttgtcattaaaggaaccgacccaggtactcgtcagatgtataaatgcttctcatatggtggtggttctaatatatcgaacaaacctacctctgacggcaactttgttcttgaagttctatctttgcgtaaaatttctgatactgattggacttgtaagcagacctttactacaaaaggtaatgttgaaggtacatatgttcgatactgccaaaacggcacatggtctgcatggaaagaggttgttgcaggggttcagccaattaatttaggtggtactggtgcaacttctgtagctgccgctcgtaataaccttggcgttggcgaaggtcaaactgtaacgtttggtggattgaatgtcaatggtaaaatgacagtcggtggtgagttcgaggctcagaactcgaaaatcacaggcaacttgaacgtttccgaagataacagaatgatcgttcttggcaaaaacaccgatatcggtttagtcaagaaaagtggtatgtcaggaaaaatggctattagtaaatctaactcgtttactattatggtatcaacaaataccaacaaccaaattaatcctgctgatacgtttaatgatatattcaaagtagatgctgatggaaaccagactgtttacggaaatgcccaagtcaacagacagttaactgtttctagtgcagcgactgttaatggtgttattaatgctaatggcggtattattgttcctactaccaagtatgtgcaaattgccgatgctcctacgcagaataaccaagcaacaaataaacagtatgttgatgataaggttgcttctgccattagtaatgcgggtgatacttatcttccattagcaggtggtactgtaactgggcggttaacaattacaggcgatcagttaaaaactacatcactttgggttacgggagacgctgctgttaatggtgttttaactgttgatggaagggctagatttaatcaagagttcattgtatcaacttcggttaacgtccagaacactggtaacagtcatttggtcttccgtaaagctgatggtacagaaaaaggacttatttgggctgatgatcctggtaatgttagtataagagcaggtggtgtctctgggccaacgtggaacttctggaacagcggttcttgccaattcccaggtgctattagtaactttaatggtgttaatagtactactaattaccctggcggcggaagtggcgcgtatttaaataccgctggcttaacaagtagatttagtaatggtgcttatgtttccttatacttccaagaatatgtaggaaattatcaccaggctattcttaatgttaacggctatggtcgagatgacaatttctatttcagggctggcggcgacttcttctgtactcgtaatggttcttttgataacgttgagattcgctctgaccgtagagctaaatctgatattaaagttatcgagaacgccttggaaaaagtagaaaccttatccggtaatacttacgagcttcataacacttctggcggtactactcgttctgcgggtttaatcgcgcaggaagttcaagaagttcttcccgaagcagttactcaggatattgaagcagacggaggtttattgcgtctgaattacaactcagtaatcgcacttctcgttgaatctgttaaagagctttctgctgaggttaaagagcttaaatctaaactgaaataatgttaaggggcttcggccccttttaggagaaataactatggcagtaacagggccgtgggtaggaagttcggcaaaggctgaaactggcgaagcatggatggcgcaagctggggccaaattaagaatagggacaccgttttggatgtctaatatgataggacaaagcgtattccatttaattttcagaattaactatgcacagggttcttctggtgatccatctagatatagaggattctttaaaagagggttagcagtaaacataggagactctgcaaaccaaccgacgctgaatgcgttccctggtggagatgtgggttcattagtagctattacaaatatcaaaggcgacccttattgcctttctatttggaatggtcaagataggcgagttaaagtgtctatatttaatgcatccggtggagaccagtatgatgtttatttcagcggaactactatgagtgatggttggagaagatatagatgtgaaaacgctggcggtctcaatgggtattttgaggctagaatggataaccagtttggtgctttattagaatatgtttgataggtaaaccaacaaattcacctcataatattaaatagattaaaaggctacctgtatggtagccttttgttgtatcctaaatatacgtatagtaacctaagaagagtcttataaaaatggctgagagaaatcccgtagataaactagccttatttgaccgggtaatctcgtttgtgatgggtgtgaaaacatggaaacaattgctgataaaaataattctaataatggttatgtttcttatggtagtaacttggtacaaatggactgatatattcccgatgataaaaggtgcccttgtagtcgatacaagggctatcgaaatggaaagaactgaaaagtttaatcaatccgcgttggaacagttgagcatagttcatcttacttccaacgcggatttttcagcggtattggcattcagaccaaagaatataaactattttgttgacattgtagaatatcagggaaaattaccatcccagatcgatcctaaaaacctcggcggttatccgatcgataaaacatccgaagagtacacgaatcatataaatggcttgtattattcatccactaaagcaagttcctacctaccgacacgtgattttgtgccagtagcttatacttttagttgcccttattttaatcttgataactactattctggatcggttttgatggaatggtacgcaaagcggcctaatataccagatatgaagctaaacatcatatgtggacaggccgcgcgtattttaggtcgagtgaggtgattaacgtaatgctggtgttaaattgtgtgttcttccaatagcccgtttgattgctttaaagaagttcatcaccgggctatttttctcgtaaatatcccaaactttcaatttgtcccacggatccggaacataatcttcattccttgccgaaacccctaacgtaacccgcctgtatccagcgctgtcgtgataatacacgaagaatggcctacctattggcgcaaccttacaacctctcttagcggctctcatagcctcatcgaacgtcattgatacctccaaaaatttctatgcatgtttggtcgaattccgatagtttcactcaaaatgaatatcggatgatctagctcatcgtggttttcttcgtcaatgacgatatcccaatcagtagccttttgttcttctaccgtggcaatgaatacctggtttacttcacacttgcggtgtgtacgtctgatgattgtatccccttcacgaaacacaatcatatcagggttggtagtgcggtacgcggttttacccgcgcacacttcattaagcatatcttcgtatgtcattataaaacctttacacgttgaacgatggtttgtttaacgtctttgtattctccgtgctctttaacggttgctttgaaagtgatttcatcaccttcgtttgcaatgttattaccgaagtaaacaacaacattaccatcaacattaattttggtcatgaatctttctacagaagtgtagtaagaaacttgagtatatcccagtgaaatcactttctcaacggttccggtcatttccagacgctgtttgatttcaccgatgtggttagctttagaaatgcgttcctggcgctcttgttcccactgttcgcggatttcttcgcgtttggcgatataatccttctccagtgcaacccccatgcagtaagcacacacggcgtcaaatacagggctgtttttgttgtcttctttagacttgtcagcccaccaaagaacagtaaacattggcatttctgcaattacttcgcctttacgcttgccaatcggcatgatccctttttccagcagttccagtttttcagtatcgaacactgacagtttaccgcgacgttcgaacagatcgaaatctgcaaagccctggaataccattttgaaagtatcagtttcagttaaacgggctgaaacacggtcgaaatactcacgcgctttcgcttccgctttctccggatcggtagataagttgcagatatagttatcagaagtataaccgccacctctacgctcaacacgcaaggtgtacattgcatttttacgaccagaagaaatgaagtaagtggtagtaactacggttgcgttagtcatggtatttctccttaaagggtatctcgtttcgatatggctaatatagcaaaagcccctgaccgaagtcaagggctttttcatcattcattcgaatctttcattgttttatgaagatgaatatcaaaaattttccagtacgcctttccgcgaggataaatttttgctttgtcaatatcgttgttgcttccccatgtgttgtttgggccacgacatcgattttttatataatctgtatgccagaataagcgctgaaccgatgattccgtacctaatggatcttctttactgaacagaatttgtatactcataagaagaaccctgttctaactactaaatcgatctgtttttccggtatcagtggcacatctgcatcaacgttgcactgataatacatcccgacatactcatgaggaatgttggattcactcgcccatgccaggttgtcgtctgtacgcggccctaacatgaggttaacgatatcgacagcgcgatcctgttctggggtgttgttgcatccgttcacataatgcccgtgagcggttttgaggatttcaatgatatcttcgtcggcttcaacgagatacagccccgtgttttctgggatttcctcaagaataatcaaagcggttttcatcacacttacctttatgtttctgcttacgttttgcttctttaagtgctcgcttgcgatcgcggtgagtagaagcgcggttaatccatgcatgtttcgctaccagattgttcatcgaggatataatggcacatgatgttgaatactgacttcaccatacatttttacgatagttaagctatcagatcctttaacaattctgtatttttctggaacaacgcggtcgatttcttttttgacgaagttaagcaatccgaagtcatctatatcttttggtgctttggaaatagaagacagcgatactcgttgacgcgaatcatagtacgaagaaattacaaacatatattattttccttattggggcttttcagccccattttagagaattaatccagcagtttgcggatcttgtctgcgatacgtccggcgcgggttgcacttgcagtatgatcgctttcttttgaagccagttccgccagcttacgctgatgttcttcttctgctgcttggcgatctgctgcaacctgtgcaacctgctcattatcgtgagcaatacgcgcttccagttcagacagggttttgtcgaaagttgctacgatttcatctacagaacgaattttattaaacagtttcataatttatctcaattggttagttttaatcagtatacatcaatacggctggaattcaaaatcataaatgtcattcagtgcgcggttccactcggtgtagttttcaccagcaccataacgcatttgaatagcactttcgaacgttgatccgttgaggttcgggaaaccgaacaggtttttgattttgtcatgtgctacatagtacagagaagcattttccagcatcgcaaccatcgcagacggttcgtgttcgcggcgcttgatacgtaacagagtacgactagcaccagttttacggcgttgatttggtgctacgtagaaacggaatactacgcgccctgttttatcatcaactaccaggtaaaacccgttttctttcagatccacgccttcgaatttcttgaaggttccgcgtttcatgtcaccaattttaattgcgtatttgtgaatgtcaagtcttgtcagaattcttttcatattttttagataccagtttgcctaattttgtaatttcgcctgtttttacgttaacaaacaaggcgatgctcagaaatgggatgctaatcactacgctgatcaatgtaaacagaaaacgtatcacaaaaagaacagcacgttcaagatatcgttgcatccacgcgattcctaaacaactataccctactataaaggtggttgcaacataaaatgcaccaaatcctttacgaaatacgtaacctttcccggattctacccggtcgtcggcccacatttcacgggcagttttcagaatagattcaccactagcgcgagtttcgttagccgaaggcatgtttttaaatttcatgatagtctcctatgcgcccagaactctccaggcgcggttgtttagttagtaatggctaaaaccatatgtaacatcaatcatgactttataacggcatacacgcatctttgcgttattgtaatccactgggatcgctaccacgtcagcaggatccacctttacctgaatgactctaccaacaccgcccccgtagtgtggaaggtatgatttagccgcaacgtgtaggccagtagaacaggtgcgcgttttatcttcgtctaccatgtttcgaggcatggagacagtcacaccaggactattatcaaatttgccagtagcgagatctttatagttatcgcgtacacgtttccaggcaagaaaacaaccatcatcggtcagttcaatgtcattatgtacaaggaacccgtaaagctggtataccgcatcgcgtgaagggtttcgcatcaaccgttcaaagaagtttaccaggtgttcatacggacgatcgttatacatttcgcgaatgattcgttgagtgatatcagaatcaaacactacatctttatatagaagctgatgaccaatgattttaatgttgcctttgctataggttcggatcgcttcttgagtatccaaacaagttacagcacctttgacatcaccagctttcagcatttcatgcgctttcttaaagttcggatgtgtttcacccgccatgaaaacgcgcccttcgtatacaaccgtaatgaacgattcagatccgatcatacgcggtacagtgtctgatactttaggcttttgttttacatcccttttcttagggaattccgctaacttgcggttgataacgcgcccaatggttcgggcgcttacgttgaactgttgggccagtgctgttttacttgcccccgtcaaccatccattatagatagctttctgttgtacttcgtcaagaattttgaccattatttccaccgtattaatttcttaaactcactgagattcttttcgttgttgtaaatcggacgaattgaataagaatcgctatgttcaacaagtgaagccagtaacgggtttagtgatttaaagatttcccatgcctgatcaacacgttttttcatattgctgcgtttaacgcgcattgatgctacagattcacgcagaatcggacaacgcgccctggaaagatttttaccatctttctcatacccttccagacacactataagttcgagggtatcaacaatcttatacagtttttcattatatcggtttttcacaatccgatcaagcgatacaccaaaacggctatgcaatgcgtttgtttctgttgagtgttccttgccaatccatccaggcaagcaattgtctttcaatgccttttcggatttaacatactgcttgcacagcatatcatcaaagcataccagatttgaatctgggatccacttccagaggctgttacggatagcaaacacaacagggatcccagtatggcgcatgatacgcgataaagtagattctttcattgctgaatccatagacaacctggaattttcaccatctaagcggctatattcatcaataccatacaaccgaacacctggggctttatccagtgataaaaactctgattttgtcataaacagagaagtttttgccagattgccgttactatccaactcataacgatatacggtcggggtttttgggcgcggttctgaatttttcggtgcatatagcgcttttgatttttcgcgatctgcatcatagatctctttttcttttgtcatttcactggtacggagatacacaatttccgattcatcaaaatgacctttccgaacgatatcattaacaatctcacgctttgaatcactatcgtaatatgcaacaaagctaacacggcttaggttatgcattttagcatacccaacgatatacggtttaaccgtgttggtatccacttttaacagaatgagtttcttttgtttccacggataataaatgcgtgtgatgtcctggcgcttggttgtttctggcttatacttgctccagcggcctccgctacccgttacctgataccatgcatctttaccgtcgtattcgttcgcccaatacccagcaatataatcatcattatatttgttgggtttgactagttcgctatggatccagccaatagaatcaccgttgatgcgaaaattagcatctttaccaacaaagttttgtaccattgaaggcagagaatggaaccacgtcagtttatcacgaacggtttgtaacttatcgaattctgatttaactcgattgaaatacacccggctgatttgtttcagacgttctttaataatccctactgtcattttatccatactcaactcttcgcgagaaggcatgaaatcaagttcaccgatcgggaagtcaataatatacgtatactggctttctgtatagcaatagaacatcgaggtatcatacaaatctttatccagaggataaatgatgttacccatgcgagcatatacaccgctagtgtatgctgatttatgacggatcaccccgctatcgttggttgcttctttcggctgatagttgattttgagaatagaagcaccaacaaagttaggacgaatatcagtaaatgattcgtatacccttgctgcttcgttttcccattctttgatatcttcaaccttaaccggaacagtgatagtaaccccgttaggttcatcgctttcaatctcatacagaggatcgcagaacggttccccatcatccatatagattgtgtaaccgcatttgataccgtcttttacagattcaactgtgaacgcatcggcatagcaaagcggagatttgcaacccagacccatagaaccgatcaggtcgtttgaatcatttttggttgattcgaagtaaacggtaaacgcatcactaacgaaatcaggagacataccgatcccgtagtcacgaataacaaaacgaggatcaacagcagttggcaactggacatcaaacgggttctgatttcccgcttctttgtgtccatcgatcgcattacaagacagttcgcgaatgattgcgcggatcttgtatttgtatactgtcgaagaaaggatcttatacgctttcttgtttgcgcgtagagatagtttgtttcgtcccttgctggtatctgtaccaactcggtagattgtttgcggtgtatcttcgcgtaatttcattgtttatttctcacttaacattaaaaataacttggtcacaagagtacttcgttggctttttgttcaggccatattctactacttcgcaataagtgtcaaggaattttaccaatttttcttcctcgacctgctgtttcttcatatcaagtataccccacacgatagccccgataatgatagaaaagaacgcacaaaatccgaatatggtcagatattttcccaacttaggcgcattacaacgtgtcataccttacccctctttgcgaatatatgcaagttcttcatgggttactggacggatatacagacggccttttgtgtatgccttgcgcccactgatccaaatgtttttcatatccttaacaccgttcatcacatcgttgtaaaacttcttatcagctttagcctgatagacttcacggccttgataatctttcatgaacaaacagtaaaggatctcattcttatcaaccagattagcatcctttgtagttgttttactcggtgaaggtttagcacccaggcgcaaggccatagcttgccacactttaccatgttcataaccgcgcccgacaagagcatgagcgatttcgtgtaaaagagtgtctaaaatatcctcgtagatatcttccgcaacatgacgaccagatagttcgatcagttttttggtataactgcaacggcccagagtttttgtaatgcgtccattgatccggaatgtccaaccattactgatcaaaccgtgtttttccatcatggtacgcgcccagtgggttacttccattgcactacgagttttcaacattttagaatctcctttgcttggtacaaaaccaatatagcaaaaagccccctgcattgcaagaggctttgttattatttcaacttcttagaaagttcttttaaatcattgagatactcaattttaggggttgtttcttcccagtatttcaactgtttccgcaattcttcggcttcgtcttccagctttttgctttcgtccgtggttagatggtagatgttcatagccactaacatttcggcatgattctcgcaacctatccacgtagacacgaatttaaccgcttcgctgcgactaaggccacgcagagaatcaggagattctaccatttgagcaataaacgcaacctttgccagtgctttatctaacgcttccttagtttcctggatacgcttattgatacgctgttgatatacattcatacgaatatcaacgaaatcctttagaagcgtttcagggcgttcatatgagtatagtttgccctcaaagataacgttaatgtttgggtttgaattttcaatcaacccgaaatctttcaggatcttttcgcgggttaacccgttggcatactctcgcttgagcgttacttcataccgaaaatcttctttcgatagatccttgtagctaacgataacgcctttttcttccagcttgtcaaggattgcaatgtatttcacacggtcatatttcactgggatctcggtgatcaccaatttggttttaccttgcaattcatacgtgccgtaaattgtaccgtctgtgatttcacctttaaagtaagggtatttcagatccagtgtgaaatctttatcattcagatatgcaatgcacccgttaacaaccgatttaggatcatgaggcggaatgtttgttgcatatgcttttgcaatcccgctaaacccgttaaccagtaccatcggaatgatcgggagatagtacgctggcggtacatgttccggatcttcatgaactggcgttaaatcaccatccatataaattgctttgaatattggcgatagtttacacttgatgtaacgaggtgcgccaggtttcttaaccaaacgggaaccaaagaacccatcacggtcgaataacggaatgttattgcaccagtgcgccgccataagggataacgcttcttctacagaggtttccccgtggtgatatccatacatagcaacaccgccagcgatagaagctactttctgaaatcccgttccgccctgcatagcagagtgaataaagaaacggtgaacgggtttaaacccgtctaccaggtgcgggatcgcacgtgaataaatcgtgtaaagggcaaacgttagcccttccacctgtacaacatctttaatacttctttccattagtcaaccttagaaaatttgtgttttccattaacccaatctttacgcggatcagattcgtcgccgaagcatagttctaacacttctttgtattcgtcgtcaagtacaatgacatcatacttcaactgatcacccagaacacggtcgtaatcttctttgcgtaaagaacccagccccttgatatatcgtacatcttttgctttatcgcggaacggtgcaaactcatcaagagaatagaaccatttttcctcgcgcccaactttagcgataacgatcggggttcgaatatatcggatccgtttctctgtgaacaaagaaggccaacgactaaagaatgcaagcaacagggttaaaatgtcgccgccgtcaacgtcagcatcgaccatgataccgatattatcataagtcattccggaagtatcaccaggatgaatattgaggatagccattagttcaaacagttctttgtttttgataatgtctgtaaaactcataccccatgtattcagaggcttaccacgtagcgggaaagcgccttgtgtttcttcattacggcattcgatgaactgaccaacagcggaatcgccttctgtcagaaacaatgttgtttctaccccaggggtatcaataccggaagccggaacgtgtttagcaatttttgcctttttcgctttctttttcgctttggtgatcgcggcggcttctgctgcttgtttacgaatcaatgcggattcaatgatcggagtaatgatttctggggtatccataatcatttttgcgatctttttgtagttcaaattcgcatgattgttaaactcacctgctgtatttgctaatcgctcttttgtttggctatcgaatgcaggtgcattaaagttatgcaggaataccacaagagttaagcattcttttacacgtgctttcgggatctcgatactatgctttttcttgatcatcggttcaagttcagaatagataccatcaatcatacactcaacatgaacaccgccgtttttcgtatccagaccgttaacaaaggatttctgtttaaacccgtcctcagtgctcgccagaatgaagctgaggcgattatttgtctggacaatggttttatccccatacatggaagcgtacagcgggaagcgattagagagcgtttcgccgttatatgtgaatttcacagacgggaaagcaacggcaagggccattaagcgatccttaatcacttctttggtttcttcatcgataccagttacaccaaacatagagaagtctggagtaaacttaacagtagtaccctgttctttactggggctggttcggtaatcgatgttctgtgcgccgtccgtacagttaatggttactttgcgtttcccgtttgcagtctcgccaataaaaatcgagctataacagtttgtcaggaaagaaccaacaccattcatacccatcgttacgcggtttttatcatcgaagttagaacccgattttgccatagtccatgccgcaactggtttaggaactattttcccatctggggtttttacatcatcctggggaataccgcgcccgttatcagagattttaaccagattatgatcaatggttacatcaatcttattagcatgtttgaattcagttcggatcgcttcatcaatcgagttatcaaggatttcgttgatgattttaaccaacccttccacgtactcaaccttgcgatattggcccattatgaaacgttcatgcgcttctttgttaaccgatccgacgtacatatttggacgcaaccgaatatgatcgcgatcgctcatacaaaatgattcgtcaacctttgcgccttttttggctggttgtggtttctgttctggttcatcatctgccagaagaaaatctaaactcatattcacctctttgtttaatcactgacattatatagggttctatgaaaaagaaaacccctttcggggtttacttgttataagggaaaccatcacgaaccatttgaggtttatcaaccgttcgttttgcttcgcctccgcaatcacaatctttcggtgcatcacgggtagcaatgcttgccatttttggaaattctttattacacttggtgcatttataggtataggtaggcattaataaatctcttttaaactcaacatcttaactaaacgggctttgtctatgtcaaaaacacattgacgtgcgcccggatacaacttttcaacttcgtataccatgcagacgaaaccaacattgtgcatgtactcgcgttcatatgcattgaaccaacgagaaaggcgctgtattgactgaaaaccaaagtataacccagccgcttgaaagtctatgttatctttttcaaggttgcgcatcaatcgattatcgtcatccggcgctggatgtcggttatcatccatatcaatatagatatcaggattcatacagaattgatccagccattcagcggtatccattgacacataacgattgacatatgggccgctttttgtttgccatttttctgtacaatcattccagaaagaacaagaaaattccacacgatatacgaacatgatataatcctcacaagtaaactcaaggtttacaagtacgataccacttatctaatttttctgcaagcatttcgttgataatttttgcaatttcgtaccgtccgtgagtagtacccagttccaggtaaatcacatcaagtgcgcacacaatcgcatcaatactttcttcaacgatattaccgccgcgttgaggctgaatgagacattcgctgatctcgccaacttccgctgataggtgatgaaccacatcactcttcgtgcgtttcttcactttatgagcgatttcaaaaaacttatcaagtacgatcgccgtttcttctcgcgttgcagtattctcggatgtcgtctccgtttgttgaacaacgtattttgtaaaatagttttcaaacacgttgaaagggatcacatgaggaacaccattcaaaaacaccccttctttacaaacataatggatttggcgcggaatagacaacccgccgctgcgttccaaatgtcgtttaacgcttgctacaaaatcgaactctttcccgtatccagccgacatactgtgatacgtgagtaggccaaatgcagaaacatagagatcattttctttatacagattcatttacaatacctttatggtagccaaaaatataacaatcaattgaaggacgttcaccagggaagtgaatgcattgcatgatgcgttcagccattagatcttctcccatgtataccgaagtagtttcttcgttgtaatgggtatcatacgacgttttaagcgtcatgcccggaagccctgcaatgtgcatgaatttagaattggtgcaaggttttcctacttcaccgttaatcatcaacactgcattagttttacgtgcttttctcatttgaatttcaccccgatttgcgatacgttccattcttttacttcatcaacaatatcataatggttgatgtatggtaaagcaatttttaaattactcgcgtcttgaatgttgcgtaggaaacgagtaggagaaagaagacacaaccgctcggatccgttgtttcctttagcggcaaatgatagggtttctcccccgtcaatcttcatatcaacagaaatcgttttgaattctggtgcgtatgacgtgattttgccgttgtctctcggcgtactatagaaacatacactttgtgggacattataacgatctgtttcaatgtacatgtaatcgccgtcagtcattccccacgcggtataaagggatccggtatagtcaccaaaggaatttttaaaatcttccttcgtggtatatcccagcgagcgcaattgcataagctggttatgctgttcgattgcgtcggctttttgttgttcctgtacttgcgcatcaatcgtttcttgccaggaattatacgcatagtaacccacaacagcgattacagccataacccctacagctttccagattttagcgtcttcgtttttgttactcatgctatattccttttaagaaaaagggccgaagcccttttgttaacgaagataaaccacataaccgctttggtcaatcgcgcggtctgcgtcattgaagatattaccacgaatgccttttgctggtgctttccagcttgcaggtttcaggatattaccatcattatcgatgaaggcggcaacagaacgctgattgaacatttcgcctgtttctttgttgcgagtatcctgaacaacacgatgatatttgcggcctttctccagaacgaaaacggtttcgaaaggagaatcttggaaacgagcgttacgcgctttgtacattgcttccatgaaaggggctgctttttctgcgaggatttcgaaagtgttcatggtatatctcctaaagtgtgtttcgtttcgatgtaagtactatatcaaagatggttattctatgcaaggcttttttcgttatccatcaaatattttaagtgttcttttaatgcagggagttcgttcaaatggcgttgcttaactttctcgtactctttgcgttcccagttttcaagattgcttgccagcgcttcatcacaataagcgatcccgcgttctgcatcctgaactttctgtttccattgtgcaactgcttgttgataaagagaaccgttaaccatcataataatttcctcccttgtttcgatggggtaactataccaaagctaccccagaatgttttaacaaaaagtgctattagtaggtatccagtttatacattttgcaccagttcatgaattcttcgaaagtctgagtattaacacgtttttccttcttcactttcttagtgattacaggacggttagtaaaacgtttttgcattttcacagtgattgctactttatcgcccaggtcttctaccttttcaaccagcgcccactgagaaccaatttcagcaccgaaagttaaaccaacaatctcacctgctttaacgtgtgctgcatattttactttaaccattttcgtattcctttctctgtttcgtttcgatgaatacaagataccaaaaagcctcccgcaatgcaagaggctttttaacaaaaagtgctattttatttctttgagcaatttacggatcccgccgccctgtgtcttatcaaagattttctttgcatcaataacagaagtgattatgtggtagttgttcccttttccgtcaaactcaaactcgaccttgtagtcactacgaaatttcacaaaaacaaattcacctgcaaagtgcttacggaactgtttttcgttaatgtccaaccattcctgtgtatcatctaactgatacatgcgacaaaacaggatcgaacccattacagcaatcacgacaaggatagctaacgcgaattctgacatcatttacccctgtttactgattgacggtgcaatgatttaggcacaaccggatttcggtatggtttgactttatggatcgtgggttcttccccaaccaaattaggaaattggttgttccattccatcgaaaatggatagggtgatgactttaactcttcgatcatacagtttactaaacggtcgccgattacacccaaagccgccccaataatcgctatacgcataaatcaccccttaattgtgtcaagtacagtaaaccagtcatgaagccatatcgttgttcttacagcgatatacgttaacaaactaatcaatgataccgctccgcaaatagccagcgtaatcaacagccggatttcaaatttagtaaaattcatatcaatctcctttctgagaacccaatataacaaaagccctcaaccgaagtcaagggctttgttttaaatttttaccagttttggcaatcgaagaactataccaggatggatcagacgtgcatccggaatagaatcacggttgattttagcgatatcaggccaaagttcaccaacaccatacagtttctttgctatagaatataggctatcgcctggttgcacgacatagcgatcagattcaatcttaaccagatcctggttaatgatatcatcaaaggcttttgctttcgcttcgttaatcgtattcccgtagtaatggcgatccataatagttaatgtgatcatcgtttctttcctatgctgttttcgtctgtctcttctaaggatggaggttcttccagccccagagcataacgtttagcatagattagcatcaatgcatctttagcgcaatcatgaatcgaatcatgctgaatgaatccatctaacatgcctttacgtagtggacacgtggtcactccgcgagtcagtaaacggttttcaatagctgtacgcacatcacggctattccagaacacggtcggcatatcttcaaacgtatcaagtttccctgtcatagttcgtacaacatcggttagcatagaacgatcgaattcagggccgcgcgtataatcgtatgactgccaacgactcacaccgtcagccgctaaatcagcaaagaattgtcgatgaccttcgtacaaatccatgtcaatatcggaagggaacaaaaccctttgcgcttctttagattgctgtttccaccattcgatcgttttttcatctttgatgcgttctggttgtttccggatgtcaaatttgtactttcttcctttagcaatcagttcctgaaaggtaggcggatcataaggatcatcaacaaacggaacatagctaagttcagctagttttccttttggaaacgggccaatactttcataatcaaatacgaaatctacgggtaaatgactcattcgcgaccccgcttatacgattccatgaaataggccaatgatagcgcgacttccggagtaacatcaacggattcgatcatgcctggagttaccgccatcataccgaactgacgaagcccacaacgagcaatcgatttttccagtcggatcatgttttctacagcctctgcgaaattgtccagatgttcccaatcgtggtaatcttccattgtagaacgatcacttttcaaaatcagatcggcaaccaattcagcataaaggcgcggaaggtgaatattcatttaaaacctctcaagcatgtttttgttttcacgaatgttacgacccattttcaaagtatcaatgatcactgcatactcttcaaaagtgaattcgatatcttgtgaaatgtttccccacgtgtaggtcggcccgttaggacagtataacccaacttctttgtttgcgttgacaacgcagcgcaattttgcaaacaacaaattgatatcgatagaattgaacccttcgagataatcaagcccctctctaccaatacggtcaacttctcgcaaaatcttttctacatctttgactttaacaataattttcataataacctcaaagggccgaagcccttagacataatcaacagtgaatcgtgcgcgggtagttcctacataaagcaactgcttacacaattcataatcggcgtatgcgtatgcatcgcgcgtatacatgtatgaatgatcatacgtgcttccctgacctttgtgatacgtacaaaccggaagcgccttaaccgtctggaacttgtttttgatttgccagaacgaataccagggggctttgtatccggtttcctgtttcatctttttatactgaaacgcgacgtagttcaaataatcgcctaaacgttcctgcataaccggatccgcgataacctgaatatccgctttcgtatcctcgaacatcgattctgttttcatcaagaaataatcgatttgcaccggatcgcatcggtcagctttgatagtatcagaacgcggtatgatttcaaggattttaatttgctcgttgttgttatagataacttcaacaaacgaaaccccattcacacggccttctgtcactaacggttcttgcatcacaacaacttcaccaacaatgaacggctgatcagttttgtacaagtgtttacggatcactgcgtttaacttgtctacgtttgcgttagtgtaagcaaacatacggttattgttcaggtcatccggagtcttaacacggctaaaataacgtctcaggaagtcgccagcgttttcgtgcttcattacccctagttcaccattcatgaggggcattaacggcttaccgtcgcgtatagcgcgtgatacctggatgattgggtttccttctgcctgacgcataatcttatccatgcgaatgacatcaaaaatttcctcatcaaagaacggtgaaagctcggtgatcccttcggtattaacaggacggatctgatccttatcacccaatcccaggatcaccgcacaactcggaatagtacgcttgatgatacggaatagttctttgtcaaccatcgatacttcttcaaccacaaacacacgacattcagacagatcagcggcttttttgcctttttgctgttcaaatactcgtaactcttcgttggttacggggctgattttcagtgctgagtgaatggtcgttgcatccatacccaccgcctcagagagaacgtttttagcctggtgcgtcggtgctgtcaaccagatcccactaatacccagttttttcaatgtttcaaacacaaattttaccagagtagttttaccaacacccggcccacctgtgatagtagtatggattttgtttctgatatttttaatcactcgatcatgtgcatttttctggtcttcgctcagatcgtcaaaagttaattcgctcatactttaatcaataccccttgaatacttgcgtgttcaataaaccaacgcatatctttctttttcttttcggttacggtttcaacttcttcctttcgaaagaatcggctaagaccactttgtttaactggattcatcttatcatgatattctttgataatcgaatttttatactcgttagcatcgtccggagatagaaacaacaaaggtgttaactctccttccttaatgaagggaattttaaacccgtctttatccttactaacgacgatataatattttgtaatcattctcgcccctcataacaaacgtagaatattccaacaaaccaaaacactgatagtataatcagtaaaagttttctttcaacgccatttacgtgaaacacacaccaaccgaaaagatatgtgatcatcgcgcaaacaccataagaaagaaccccaacagctactagcgcgatgatcggatccattagtagttgttagcccaacggcggaggttttcggcttgtttcagtgcatacagtttgtagatggtttccgcatccatacccagcgccaggaatttgcacataaagaaatgccactgatcgataagttcaaacagaacttctaaacgatcctcttcactcagatccgcaaatttagtattgcgcaattcctggtgatttgctttccacggtttccaaacaccggaagcaggtttaacaccgcgagacattccacccagagcggtatacaattcgcgggtttcatcggcgatcgcgtcgtcttgcagtttcagccaatcaaggatttctccacaagtttccagattatccggacgcggaacccaatgcagggtatcagacaggctttgttgtgcatggttttgtaaatccagcatggattgtaaaggatcgccattacgggccagaaccttttgatattcggaatctacaaattccagatcttccgggttaaccaggtgcgcacatgaattaaatacaggagttttatcagtagtcatatcaatctcattttttcggtgatttgtcccacgacttaaatcgaagttttgccgtgagtccagaaacagtattatctttcaaatactgcataatttcaagtttagttgcgccgtccgtttttatcatttcgttgatatctttggaaggccacgggcatttatcccacattacaaccttttctccagcctcaatcaatttaaagaggcggtgagtagtatccggatgacgtgcttcattgtcaagaacccagacacgcatatttttatacggaacctcagaaagtgcaagctgtccaccagtgatagcgccagcattatcaacaaacaggctatctaatggcccctcaagaagataaaccgtttttagcggatctatcgtatcctgtccgtaaatcttggttgattcttcacaggctttgattgtgatatatttcgactttgccccgtcgcgtaaagcacgaccctggaaagattcaattttccctttcttatcgaagatagggatcactaatctcggttctggttttgcgatcggataggtatccggattcaccgtattaaccagttgttgccattcgcgagtaaaccacaaccgatcccacttgtcacgggggatacaacgattctgcacatattttatgatcggatgttcatccggcaaggtatctaacctttcgcagaattgaagagtaggaataaatttcttctcttccttcggttgttctgtatgcgttggctttaacgaattgcgatccttaaacgattccatgagataatcacggtaatcgtctggataatattctttcaggaatacgctaaacggtacaccataaccacagttaaaacaaccacaattcatatgatcaccctttttagaagggtagatccaaaatcgttttttgtacttgtctttcattgagtcgccgcaaataggacaacgcgcattgatgcttaatgcccccgatttacgaacgatttcgctttgaggcagtgatcccatgattcgggttgcaaattctatatcaagatacatttcttacctcagttgactatctttagatcctcgtcgattataccccgcgctgatcatttcgtcatgttctttttggcattcaatacaataacggcaacccttcacgatagccctacgtttttcgggtatcggatccccacaatcaaaacaatgcgttaatgattctccgtttctgatttgagaacgtgcaaaatctatcgcattgtctattgttgcctgaatggtatcttgaacaccgtcagcagggccaaatccaaccgccattgtaaatcctcctaatcaaatgatttcaatatcatagactaagaggatttttctgtcaagaacttacttgcttttctgttccgtcaagcattaacttccaaccacgaaatgcctgtttaaacgaataatttattgcaatatcaattttatcagaaccttttcgacgattctgataaacggtcgcgttgtcactcatatacatgatacaaattggaaaccatgtataatcgttagcagtagcccagatagtgatattcagcggaggaattatcatttctttttccttttccctgcacgggtaacgcctaatactttcggcccgatgttggttactgctccagtagtcacaccagaagcaatcttttctatatcgccgccagaatcaccagcgaccatatcctctaacatacgccccttatcataatattctttgaggcgcggaacgttcatcatgatttcttcatgctcttgttctgtcagattgtagcgattgcgtagggtatcatatgaacttgttaagttcataaacccagtcatatacggaacagaattcattctacgcttgatatggcgtactgaacgatgaaaaggagaatacgcttctaactcttcttttgttttggggttacgaattacttcgccttgtccatcaaggatccccagtttataagcagtccattcagtccagggctttttgagtagccggatcatccggacgctatatgttaaatccatatttttaactaattgatcactcatgattattactctattgtgaaagtgaataaatcagatttggtttcaggttcaaactccatacaaacaacctcgcatagtggtttaacccctttccaatcctccaggtaatacccagtatctataccgcatccaggattcataacgaggccagtttcatcaagaaactttttgcatttacttgatgtggtgctgtcatcttgtcggaaacagtgtgttttcgaataccggaaatttgcagacatttgagggattatgaaagttccctgacgcgcgatctgtgatgcacgttcgattactttatactcaaattctgcccctgtatacttacccttaaaatcagatgttttgattttaccaaaaggcggattactgatcgccatatcaaacacctgattaaattcagttgttaaggcgtctccatgcacccaggaggcttctggtacgatacgcttacctaactcatagtatgtgtgatttaactcaacacagacgatttcacgcggcgtattgtacatcatgtaatgaaccatagcgaaagataacccaccgataccagcacacaggtcaataacacttccacctgtgcaagcatcgattgtgaaatcgcgagcaagtccaataggggtaaagaacgcccctaattcagaattgtttgtaaacgcgccttcatgaaagttttcaataatgaacaacttctcttcgtaagttagcgctttgtcagagtgaaccagatccattatctgattgtgtttcttggtttccgctttcgttaactttgccattttcccagctatacaataatgttgattcgttagggtagaattcccatccgtctacatatccggtttcccagtcagtagtttgttcaaaaccacagatccattcatatacaccaggaggcatttcgacagaatcaggaagcccgatatcttccgcgctgcgtccacattcaaagaatgcatcatgaatgaatggtcgagataataccgtaacataaccttcatcgtcaacagctacgatccagcgcgaactgtgaggactatcgaacttcggttcttcttcgtctgcgtcagcttgcatttcggccttacaaaaatctaaatttatcatttcaaaccctctttaacaccctctttcatggctttccaggtagaacctgcttcaccattcagggcggcgaatacaaatagtaagatagcaaggacaagattcacaccagcaatcaccatgattttgctatacacgaaaatgtaaggcattgccaccacccaccaactaaaagaattaccagttacgatgttgagtgctgcaagtaagaaagtgataacgaatgcgattttcataatgtcctcctttgttatgattaaggtatcatcttttgcgaaagaatgcaatacctacagatacaaaaaagcccctttcggggcttaatttttatgcgttattgatgagataccgaagaacgtttttcgcttgttcctcattacaaccaactttgaaaccaggttcgatagggaggaagttccagaggaaatcaacacttccttcaacgtcatctttgcctttttccagcatcgctaacagtaaacctttgtttttgatgctgtttacgattgcgtcaaaataaccatcgctgaaatcaacattcgggttcagcatttcgttgtaagggttgttgaatacgttcattttgaatctcctttgtttaactcagtatcttgtctacgtgagttatattaccacaatggagattcaggtcaatacctttttacgattttttgaaaaatttttcgtatttggcttttacccagcgatacatatcttcggccttgtcactggcaatcagtgagaacagcagatagatcgcaacacccaccaacacaacgcctactacaatgtagacgggtaatagaactgggaagagaacccagaaccatgacatatgcgagaagccaaatactttagccgctgcaaaaatcagtgtcagtccagtcagaagtttgatagccggaatcggaatcgttatagtcttagtcatttcattaccttacattctttatggggctattcgccccagtcaattaaaattgaatgtcagattttgcaatctgtgccattttttcacgtcgggtagattcagcctgtttaatcatcgggccttgtgtctgttctactgttttaggcatagtgttgccgtggtagtcagatttaaacccgtattcgctgttgtcggtatccatccagcgctgattaccttttcgaacttccaacttgaacttgttgaaagtgttcttatcgccataacgggatttgatttgcttgaacagttgcataccctgatcagctaactcttccgtctcgattacagctaacataaaatcagccgtagcaggtaaaccagcggattccgcaacatcacccatactcacatccgaactatcccatgcagaacgcccaacctgtgcgcctgtccacattacggtattagtttcaacagcaagaccgcgtagttcttcggcaattgctttaaccagaatataggtattttcagcacctttaacgcgggttgaagtacagatccccaggtaatcgacaatgatcacatccggcacaaactgtttcttcaatttaagctctttcacaagcgctctaaagtggtttgcacctgcacccgatgtagggtactgcttgaccaccaaacgcccaaccttacccgctttaaggcgctccattttgttcttatagtctgcgtatgtaatgttcccttcgtcgatgtcatccatagtcacatcaagaaggttagcatcgatacgcttagagcaaacatgctctgccatttccatagaaatgtaaagaacgtttttaccctgttgcagataatcagccgcaagagaacataagcccagtgatttaccaacgttaacaccagccatgatgatattcagtgtaccacgttccgcgccgcctttggtgattgcgttcaggatcgggataccaaacggaattttcatcgccttcgattggtaaagcatccaccgtttttcataatcttcgaaatagtcatgacctactgaactatcgaatgaaattgctaatgcttcctccatgatttcagggatagccccaacaccaggaagtttcttgttctgttctgccagtggtttttctgcgttagcctggatctcgattgcgcgagaaagagcacgatacattgctttgtctttgcaatatgtttccgtttccttcattagccaatctaaatcttctggcgcatttttcagcgactgaatcgcctttttcgtgtcttcgtagactacatcacttagatttcgtttgtcaagcgcaacctctaaagcagtttttgacggaataccgttgaattcctgtacatgtttatcaatgaggtcaaacaaaacttgtgcattgccttcaaaatattcctttttcagatgaggccatgcttggacaaaatacgtcccgttataaatcaggttagaaaatattgtatcaacgatcattgtattgccttataccaggttgctgaacatcatgaaaaagttgtaaaccttttgtttgaatacatcccataatgtcagcttaggctttgggacaactgaacccttttcaagctctttaatctgtgcataaattgcatcatgcaccagcgggatcaacgcttctttgtcttcgtctggggtactgaattctactttcagaccatgatcccaaaacaccttatgaatataaaccagatgcgcaacacctttttcatcgttaatcagaagttcctgaataacatctttcatcgcttcatcaatataattctttgctttgctctcgatatccatacattgcctcggttatggggccgaagccccatattttataaaatttcgtcgttttcttcgatatcatcaaatgattctgggatatcgtcatcacccagatcaggatctgggatgctatcagtgctgtataaatcttccagcgcggaaccatcactgatttcacgatcagggatcttatacttttcttcgatagctttcaagaatggttgatgagtaaacagaggacgccagaattcaacgctatttgtttctgactcacgccatttcttttcttcaacttcgagttcgccagtctcggtattcaggaaagcacggttgcgccagcctttggttacggtctgtacaaagttcatttccattgccagatccagaaggccagaatacatactaataccgccttcataggtaacatgcagcgggaattttgatttctctttcacgaatcgagatttttcgatgttcatgatgaaatcataacccactacctcagtaccttctttcacctgttgtttacccaggatgatcgcggtatcagcggaatacattaaaccagtaccaccggaaataactttcttgctgtacatttcttgtgtgtcataggtatgacagatacaaaccatcgggatatccaggtcagccaaataaggcgtaaccatacggaacataccttttaatgcttttgctcgcgtcatatcctgtttatcgttatcagacagcgcgtcagcaagttcttttttacttgccgtgttgcctactgagtcaacgaatacaatcaccttatcaccgcgttcaagcgcgttaagctggcttacaacgtcattacgcaactgctcgaccgtcgtgatacgagtatacacaacacgatccggatcaacacccattgatttcagataggatttagtaacacctttttctgaatcgtagaacaggcacacagcatcttcatacgttttgagataagccgctacagtcagcaaacctaagttggatttgaagtgtttggacgggccagcgaaaagggtaagaccagaagttaggccaccgttaaacgcaccggacaacgccagattcagaatcggcacacgggttcgcgtgatggtaatattgttgaatacgtcgctttcagaaagtacagatgcagtttggctattcgagtttttgatcagtttttttagtagtgctttgtttgacatttaatttttccgatttattcattctcattctatatatctcactagttaatgaaaggggccgaagcccctagagtttaccagtcaccgaacaggtcgtttaaactggcacgtttttcataatcaattttacatacttccgtgatattagtcaatggactaataacatgtttttcaaacatacccggataatctacccatgccagaatatcactttcgatctctgacggtagtttatttccggattgccacgcgatgcaatcggcttgccacgggtttttatcccttagtggtagaaccattaccttttcaccttccatgattggcgtaacaccatcaataccagcagtgaaacggttaaagaacagcacccctttaatatggtttggtgttcccttgattggatagccagccccatcacgatatttcgaaatgttgttagcagatgatacaccagcaatttccctgtagtcaagttccttatattcttcttcgaactttttataatgttcgtgcaaagataattcaccttcttgcaggatacggcggatcgcttctttcaggaatactttcacagaggtcggagtactcgatcgctgtgtttccatacccatgattttcagtttcggtttttcatagcgggttccttcggagtcccacacgttagccgcatatcgttttttagcagtccagaaacttcccaacccttcggaacccaacggaggcccagaaatgatttcacgatccataaacatcaggtgttccacgttgttcatgtattcgcaaagttcacgataccctttatcgatcattggttccattctttctttagcaaagcgatccaggaagtcaacccaatggttattatccttaaatttagcctcaccaccaacttttgcaatcacgttatccatacaaacataaatggagtcagtatcacagtatcgaacatatgcatgatccgtagtaccgcacaggtcgttaagatattcgtttaccttacgttcaatccactggatagccaactgcccgaacatggtgatcgcgctggcgtttcgtagatcgaagtatcggaagtgttcgttacccaacgcaccataaagggagttgatagaaatcttacggttaagctgtgctgtgttcgcttgtgcgatcttcttctcacatacgcgcttaactgctttaagcatttgttttgtaagagttttcagaactgctttcgattcatcactgaaatctgtatagaaatcaaagtcaggatcaatcatttggttatgcgcgtctgttaagtgttcgagttcgtgcttgatgagttcaagatttcgctcacccgccatcattcgttttttccacatcttacgctgatcaaatactttcttgatctctactgggatcacgcctttgatatcacggcggaacatccacccgttaggagaacagctaaattcatcgctagggcgcggcgcggtcttattaatatactcttcaagagcacgtaccgcaaaacttcccataatcgtttcagggcttatattcacctgtcggatgatggaagggtacaggcttgttaagtcaaacgataccatgtatttgtaaggcccaggaactggatccttcacaaatgccccagggtaaggggttttagtatggcgtctgttttccggaataacaaccttatcttcacgcagagagttataaatgatcgcgtcccacgttttcagcggagacataacccctgggaagttaatttttgcatagtacgctacagacagaaccagttcaataaagtttcgtttaccgtcgatatcaagtacgcggataacgtcaacaatgttgtacgtgatgtacagttgatgatcgcgctggcgtagttcagacagggaaccttcatactcaactttatttttaccagtttcgtattccgcgatcgcgtccagacggtaagacggttgcggggtaaagctgaatttcttatacagcgccataccatccatttgagcaacgccgaaaatatcatatcctaattgttcgttgccgtaagcgtcagtagtggttctggcggttactttaccaaacgggctaaaatgccttaccacgttttgaccgaaaatgttcaggtatcgcgtgatgatatatgcaatatcgaatttgtcagagttccatccggttacaataacaggggttcgctctttccaatctttgatatacgcagacaataacgacttctcggtctggaaagaccgataaacaattttgtttaaatcttcttcgctaatgtctttgcgatcaacgttttccgcgcaccattccgcaaggccaccctcaaccagatcgtatacatagaatttatcttcaatgctatcgtaatgggtgatcgcatcgattggatattttgcttcacgcggatccggaaattctggagcggtcacctcgatatcgatagaagcaatgcgaatgtgttcgcggttgtattcgatttcattccggtacatgtcagaaatgtaagccagtcggtaatcgtccatacctagcgcttccatcccaacatcgcgcatacgctgcatccagtttttagcttctttgatgctgtcaaactgttttttgaggcaaggcttgccgtaaatgtctttgtatggggtttctacgccattcatagcgtgttgatacattacgggcgcatatttcgtcttacgtacctgttcggtgccgttagagtcaacgaagcgctcgtaaatggtatctcccatttgttcaactgataggtaaaattcattcattggatcttgtcttctccattaatataatgttccattgtaacaccacctacagcaaattcaagtttactcgatgttctaaaaccaacaacccttctgctaacaagtcacggatctttctcagttgaacaagctggcgttcaagtttaaacccgtcgaataacatgctaaaaatactggaattgatactatgatattttgcttctgcaatgccctgattaaccatcatgatagctttgttaaccagtagtttcctttccgttactgtatgttcatccagttgacaggttgcaagggaaaccagatcatcataagcacgttgatcaataacgttatccatacgggccgcgaaaattttattcatgtaagtgcggatcattgcgcgacctccattcttttcataaagacttcttttgcttgttggatcaattccagagattttttaatacgctcatagaaatgagtggtttcaacttgattgcataacaatgtgtactctgaaatgttacgatcgtaaaatccaggaaagtagtgttgtgcatagctataagtgcgggtatctgacagattgcaagttaacgataacaagatgtcatcttttacaatcgggatgatcaaagtttcgttggatttgattgaatccatgatttcgttaatagtcataatatatccctctcaatggtgtacacccaatataacaaagcccctgcacgaatgcaagggctttttgattagtgaccgatccggtacttgtacttgaggatccaatctgctttttgcgagtgagtcagtacgcggaagttgttttcttctgcaaacttcaacccaggggttacgatcttaaccatgccccactcttcgagaagtcgcgcaatgttgttccggcgtagttcgtcttcttccgtcatatcgacttgacgaccatcgagtttcaacagttctttaaaatgcacgataaaatacttaccttgctttttcagaatgtggcacgattgccagagcattttctttttgttgtttgcaataccaatacgggttagcgtttcacggatctttaaaaaagaatcgtcgctgattagttgaatttctaacatacatcaccattgtttaatcaatttttccaatttcttttgttcagctttgtttttcacaatacccaacaaagacagagcgacctttgcgtgttttcttttccaatcctcgaacattccgaggtctttaagttcctgcaaatattccatcgctgtacgtgtatttacactgtatttttcgcgaaggatttcgataataattttctcttcaaaatcttccgatagtttagcccatgcaccgaagcgtttagccttcctaacagagttgagataatagttatagtgcatttggtcagagatactaccgcctaccagattcatcacatacgcgttgtatatcgtgtctatgtgctggctcattgcgttgtctacaaagtacttatcatacacttcatcgataaccaacggcgttttgccgttgttgatttcgtctatgatgttaaacaaggtgttttctttatccttgccgtactctttgaccagttcttcaaccttatcccaatctttagaaagccaagcggattcatgcggggataactcttcttcatccagaaattccgccaggctcatgattacgcctcccagaccatagagagcatcaggttcatcaacagatattgcagatgaatttctttattcatcgccagcccgtattgcgcgttgttttcgcctacaatctggatcagtgcgattttcgaatcctgattcacgatagggtaaatcgtatcagtcaattttccgataaaggtatcgtattctgacgcatatttaataacctcagagcgcaaccctttatagttcttttctttcaacagggtaatgatatgagacacatcagaaccaactatctcatttaggatccccgcatcaatttcaccacgtttcgagtagaacccgatcgctttgataatagaacgcgcatccggataatgctctttaacaaacgctgcaatgactttaggatcatacttgatattctcgatttcaaggataccgaaacaacgcttgattaactgtttcatcagttcgatacgttcagcatcagacggaacaccgaatttaacaggaggacaacgagaaagcagagcactatgcacaccgttaatgttgttcgccgttacaataacagaaacgtttttactgtatgcttcgataaagctacgtaagtgtttctgtgcttccgccataccagaacgatcgaattcatcaatgatgataatctttccgcctggtttctgcgtcattgatgaagcaaaacgatccagttcattacgaatgaagtttacaccacagttcgaaccgttgacaaagaacacctcagcatcaacctcacgggccaacacaagcgcgagggtcgttttaccagtgccaggggaatcagatacaagggtcatgttctcaacacgcccagatttgattatgccccgcatagcggctttgtcaccagaaggtaaaatacactcttcaatcgttgttgggcgatagcgctgatcccatgcaaattcatcaggagatcgagagattttaccgtatttggtttcgatgatttcaatattttcactaagttccataatataccttcaaaataaatggtgtaaaagaaaggggccgtagccccttaaaactatcttacttgaatgtgctacttgcttcaagtacgacgacgtaagcaactccgttatcagaagagaattttgcggcccctttggaggaaatctctactttgtaatcgctgttgatgaactgcatgttatcaatcttcatatcaaaattgaaaacattgtcgccttcatactcaccgacttcaacggagaaagttgattgactttctttgcttttcgcggtgatgaccagtttaccatcaatcggttcaacggacaggtcggtcagtttcatcatgcgagacgctttgatcagtttttcgaaatcgttagaggtaatctggaaaatcagatctgctactggcatcaccagacgttttttcggtttcgggatcgttgttgcgtctgctgaacgttcgatgatcttcatcttgtcgccgcgaatcacgatttcaccagttgaaatatcatgagtgatttccgcgtcagtgccgacgatgttcagcatgttcaggaatgagttgagatcgtagataccaacatcttcatcaatcacatcagcaatttcagcttctgcgtatacaacgctgttgattgatttcgtcatgatgaatgaacctttggtcagcatgatcgaagagttgatttgagaaaagtttttcaggatatcaatagtttgtttagagaatttcatattcagcctttagttttcaataagtgttacttaataagtgattttacaacggtttccgctgctgtgtcaagcatatcagccatttctttaacggttgtacgcttcggatcttcgcgtcgttcgctggtaagtttacgatgttccgcaaccactttttcatcaatgtcacgatagtgtttaaaacgttcctcttgaggcatagctttaaacagttcttttgtttcgtccgagagtttagcaacccaggatttacggacgcggttcatgtagtcaacaaaaacattactttcattcatatatttcttctctaacttagaattctttgagtgggggccgaagcccccgcttgtattacatgtctaacagtttatccaggtcatcatcaccggagctatcagaatcatccagatcgaacggtacgccgtcatcttcgcctaccggaaccgatgcaacaccaccagatgatttcacatcagatgtctgattgtcaaacttagccatttcgttatcgaagttgctcagttcgctatcaaggtcagcggaagcgctggaaccagcagaaccgatcgaactacccataactttattgaagcgagtggtcaggtcagccagcggtttaaattcgctttcagcggtaatcgggcggagatcgctcataccttcgaaaattgctttctgaacttcttcatcgtctatgtttttgatcttagccggaacaccaaacgagctatcgtcatagttaggccaatcaccaacttttttcgctttcagggtgaagttagcaccatcaaacggacaggttacagcaatacccggttcatcaagttctggattaccgttaattgcggcggtgatcttgtccatgattttcttaccgaagcggtatttgaacaccttaccttcgttttccggagcgcctgggtctttaacgatcaggacgttagcccagaaactttgtttacgaccgatctggctcagtagcttatcttctggcccgtttttgttggctttagccttctcatacagatcgttttcggaaatgtacttacatgcaggacagccgtcataatcgccgtgggtagaggaacagttctcaatgtaccactggttgtttttcttgaaagagtggctcacgatacggacgaacgccagttcatcatcggaacgtgctgggaggaatcgaataacggcggaaccgtttttctgtgcgtccagggtcagtttccattctttctcatctttctggaagccggaaccacctttcagatttgctacctgtgcctggagtttagcgggatcttgacgtttaaaaatgctgctcatattctgttttctcgtttagtttagtttgattaacgtttgtttcattaagtttcgatattttatgatatctttttcagtaaggtcaaatatttttctgtatgcctttaacttaatgctaaagtcagaccaaataatatcatcagctacttgatcgtgtttatttatgatacctaaaaatgagtcaaaaatcaaaaacgattcgtaagatatcacatttgacaggacaagtttgcttatgtaggacgttgatgatttttcgctgtacttgaacaccagagacacggggatctctttcattttggcgaattcgtacacgtttttaacgtcatccacaaacacgttatctagtctttgtaactttcctatgtactgcctgtaaaagacaatactatcttcatcaacatcgcctacccagaaatccggattggctacgaagttggagaggaatataaaatagatttctttgaatgtaaagcgttgagctaattttacaaagaaatatctatcctttcgcttgttaaaggcgttttcactaactttgatctgccagttgtattgaaggacatcaaaacgcccctggaaatgagttttcatcgccagatataacttgtatacagacaaaggcacaagccgtgaattcgcctcgctatcagcaaacggagctttgaatctcacatgaagccgtccagagtggttgatgaactatgttcaagcgcaaccgatgggcgaagcatgtttcctttgatcgcttcgtcgctaatcttatcaaggatcgcgcgaggaaccgttttattcagcatcgcataatcaatagaattttcatccatccattgtagcgttgcttccatgtaggttgccccctcagaggcaaccagattttcgatatacaaaccgacttcggtcttatttccgatcatgctttacgccttatcgatcatatcatacagttcgatcagttcgttgttttcttcttcgaaagcggtacgggcctgttcgtgatacagtttgaacagtttcccgaaggtttttccatcgataccgaaatcagtttttgctttggatttgatatccttgaacgtaccgttgaagatctcaacttgagttttcacgttggatgcttctttgatcagttcttttacctgttttgctacatcagggtttgtttgtaaaaattctacactcattttgttacctcaaaaatcactcagtttttcgaacatacgggaaagtttgttatccatgaagtaacgttccattttggctttacttccggattttggagtattatacgcttcaataatcgaattttcaatatcttttggtataaattcgaaatcgcgtagttcctcattttctttgtaacgtgcggcccattcaggggtcatcaatgttgtcggatcgtctgcctccagccatgcctctaactcagaggattttaccgctggggcgcgttcaccttcaaccttcgtcacaatataatcatttctaattttaatgcaagcgatactatcttttttatcgcctttgatatttttgtatcgcagatcgttacgtggcgaaccgtacttaggcgttacccattttttctggggaggcgaccattgacgaacaccgttatatttctgtagttgtgtaaagtcgctatcagcagaaaccactaatactcgtctaccttcaccaacagcttttttcgtaacaacagcaattatatcatcagcttccgcgaattcaacctttaatccgagataaggcatattctgacggatttcttcgaacacaggattaaggaagttgttcagacgatcccaatcccattctgattcttcgtgttcgatctgacgacgttttttgtagtaccaggctttttgcctacgccagtaatttctgtcatcgaaggcaatcacgatttctggatactcacctttaaattttacaacgttaaaccgtaaagtgtcaagcaccagatgacgaatcatttcgatcgtgatggatgcttgttcctttggtttgaagttgttcatcagtgtagcgatggaaatgttagagatatcgatgaccatagtatcatcgggttccccttcatcttgcatcagcttgttcaagttaaacatgcttgcaaaactgctcatacatacctcaatttttcaaagaacggggttattgtagtaacttacgaaatgaagtcaatacaaaagaccataaaaattttgatcaataatacttgatctgatcaaatttatgatctataatttattaattaataattattttactacaatgatcattgtaggtcaagtactaaaatcaataaattttatataatttagatctgatctatagatcattagatctactttaaccttaaataatatagaatgaaatttgattttgtctacagttattatataatattcttaacttcaaagaggaaatatgaatactatgactaaagaaacaaccaatatctacgcagacaatgaaaaattataccctatcctctgtgcatggaaaaagcaaatcgccgaaacaggtgatcgcaaaatgcctaatgagttgggggctgctattatggatattgcaaacgggctatcacgtcgttacaacttcaaccgttattccgaagattggaaaatggatatgatcgatgacggaatttccgctgcaatctcaggactgcataacttcgatgaaactcgttataccaacgtttacggttacattaacaaagcatgttggcaagcattcgtaacacgtattctgtacgagaaaaaagagaacgcgaagaaatataaattcttccttgagcacgtttacgactgtgaagattcagatatggttagtattgcagacgaaggtttcattcaagatctacatgacaaactatctcagtacgaggcttccgccaccaaaaccaaagacaaggaagcggaagtattcccaacattggaagattttctatgaaagcaataattgacttaaacaaaatattaactgatatcgattacgaaattgacttgctaccctacttcgtaaaattagagttgcaaaacgtgggaatcccggttatcatcgatccaactgacgtaagaaaccccgatttcgaagtagaagaaggggttttgtcttatatgataaacgccgaaactatgatcatggagatcacttatgattgatgaagagaaagaagtactaaccagtgtggaagaagtggatccagaagaggaaattcaacaaaagatccaggaacgtgtagaagccgacgcattgaagcgagcacaaaaattcattaagaagaaccggactgagatcaaacgcctccgtagacatgcagaggaagccctattcaggggtaataaagttcagtatgtgtatgcggttaagaaacttcgtgatatgctcaaacagccgtatacagaggatttcattgatacgatgtggaacacttcactagcatcaattcgaaatatcgtagcttcacaacagaagcactaacaaacaagtagccccgaaaggggctatgagggtcttatgagaaagtacttaatgatcggggatactcacgctggcttgcgtcaggacaacccctggaatgaagaaaacctatacaatgtattcgtacaaatcgtagaacactgcaaagcaaacggcattaccgaggctttccatgctggtgatttctttgatgtgcgcaaggccaccacacaaaccacgatgaaattcattcgtgaacgtattgtgccactactggaagaagccggattacatatctatgttctggttgggaaccacgattgccagtttaaagacaagatccgccctaactcaccgcgagagattcttgatcagtatgattgcttcacggttgttgatgaaccgatgacagtaaatcttgatacttctccgctgcaatcaatcgatttgatcccgtggatttgtcaagaaaacacacagcagatttttgatttcatcaaaaagtcaaaatctcaatactgcttaggacactttgaactgtccggatactatttctataagaacagtaaagcggaacatgggcttgaacctgatttcttaaagaaatatgatatcgtgtattcaggccactatcatcacgctaacgaaggcgctaacgttttctatatcggtacacctcttaccatgagcgcaaacgatgaggacgaaaccaggggcttctatgagctatcttatggcgacggtaaacgtgaattaactttcattgctaacccagtatgccaccatcgccggatcacctatccggatcaaaaagatgttgatgttgcagattacaaaaattgctctgttcgcttgattgtacgcgaagttgataacgatttgcctaagtttcaaacaaaactggaagaaacagtttatgagttgaacattgtcgatcgtgtgatcactgattcagaagttgatactgactttgaaatcaaaagcgtatctggattgattagtgagtacatcaacaacatgcagatcactccagaagaaaagaccgaagtatctgcaataatgagtgcattgtatgcagaggttacgagcaatggaaatagttgattacgttaatattttaaacgaagaagggcgatataaagccctttataaaatgtttggatttgatgtgattgttgcagtacagcaggattcctataacgagtatgtgtcattggggttcactctgattaaagacaactatcacgaaacaaaggtttggacatttactgtcctgaatagcatggatgaagattccgtgatatactgctttgatagcacgattacaaacatgattagtgatatatcccaaaggataattgatgaaactcaaatttaaaacattgacttatcaaaatatcttgtcggttggtaacgtaccgatcgtcattgattttgattcagcaaagaaaaccctcattacgggtaaaaacggcggtggtaaatccaccatgatcgaagcgcttacatatgctctctttggtaagtcatttcgcgatctgaaagtcggacaactggtgaacagtatcaacaagaaaaaatgtctggttgaactgttgatcgaatacggcaatgatgaatataaaatcatccgtggacaaaagccgaaagtatttgagatctggaagaatggcgaaaaactgccggaagattcagccgctggtgattatcagtcacagcttgaatcaatgttgaatattaacctggtgggctttaaacaggttatcgttctgggtactgctggttatgtacctttcatggaactgaaaacaccagatcgccgtaaattggttgaagatttgctttctctgtctattatcagtgaaatggacaaactaaacaaatcatacatccgtggtgttaaccgtgaactggatacgctttcaatgcagattggacacgtacaacagcagatcgcaacacatcaaaagttcattgacgaacaacgggcaaaagcaaatcagaatacggcgcgttaccaggatatctacgattcccacgtagaaacagcaaaacagattaaagcgcaattagttgaacttcaaacccagatcgcagaatgtgtgatcaatggtgaagaccaaacagcaaatattcaaaaactgcgtgatggttatacacgcctctcaatgaacgtagaacagttgcagcgtcttgaggtgatgtatcgcaagggtggtgaatgtccggcctgtaaacagccaattagccccactcctgaacgcatggaagagattgccgagaatattaaaaacggtactcagaaacttacgctgattaagaacaaacaagatcagctacagaaaatcatggatgatttactaacacaacaacgtacactaaatgggctgaaatccaaatacgaatcactacgcggtacacttcaaaatgaagttgcagcggctaaacgtgttcgggctgtcatggataaagcacaggaagacgtggtgatcgacgaatccccagttgaaaaactccgtgaagatgaaaaggaacttgattccaaacgttctggatttgtcaaggaaaaatatttcagaggtattgttacggatctgctgaaagattccggcgttaaagcgagcatcgttaaacgttatattccttacttcaataaacagattgcgtactatctggatctgttgggtgctgattatcagttcactctggatgacgaatttaacgaatcgattaaatcgctgggtcgtaatgattttagttacgcatcgttcagtcaaggcgaaagagcacgtattaaccttgctttattgttcacctggcgcgatgtaaccagtaaaatttctggtgttgatttatcccttctgatcctggatgaagtgtacgatggtgcaattgatcgtgatggtagttttgctgtaaaagcactattggatgggataaatggtaacgtaattgttatcagtcatcaggatttggatccggaagatttcgaccgacatattgttatgtcaaaagtcggtcgattctctaaaatggaagttaagaagtcttaaacttgcagttatcaaaatgccagcgattcatattgctggcatcaccagatttattgcaatatggacaaatcaactgcttcctttttgctggtgtctttctatctgggttatttctgcaatacggtatatgtgaacgcagataatgtaatgacgattctgttccgcaatatggacaattgccccgttctttaggtacgtttccgttcttatgggaacacgggataccctcgaacttatgtttcaatccttcattacctggtttcagtttgcagttgtcgaagtgccaacgagtcatatttccaattatacctgattttccgcaatgaggacacacaaccctttcttgttgttttttggctttactcattcgctgtctggtttcttcggtgaactctctattcctatgtgcttctgacgcctttttctttaaccattcatagcggcggttagctgttctttcctttgatctattggaaccaactgttaacatatgcgctgcaaaaacaagtttgttatttcctgggtacatcttgactaataacagatgcgcaatataatgttgacgcgctgtaagattaaccaaattatcatcagaatctgttccacctatgcacttaggtatgatatggtgtgattctgtatatccatcatactgcgtttgtttagcatgttctatgatagagttataaattttgttatagttcataaacatatctcttgtttgatgggccgttagatacccctatttaagaggatgaaattatgttattagaaaaatcttttgaattagaaaccgctctggaaatagagcggttttatctccacaacaattttcttgaagaaaaacatatagttactatgaaagatgttgaggaagcattcaaagataaccctatagagttgacgcgaatcaagaacaacaaaagttctgtttggttcctcgaaaaaatctattgaccgaaatccataaatacagtaaagtagcccatgtaacgaaacgtgggctttgtttttatttgaggaacaataaatgatcactgaatccaaaatgacttatcaggaagcactgaaagttttgggcgcaactggtagcgaaaccagcgctgaaatgtccagactcttcaaacgtgcatccttacgcaatcaccccgaccgtggtggtagcaatgaattaatgcagaaaattaaccaggcttacgacgtagttacaaaaactgggcctagtggcgcacgttctgagactgctggtgatgttcgcgcacgttatgcacgtcaaaagaaagaatgggaagaaaaagttgatgcttactttgtagtggcgaaaaactatttcagcaccaaatttaacgcacaggaatttgcggaatacttcaccaaatacactggattgcctaccactttcaaacaggaagtaacaaaaggtagtcacggtgtttatgcttcgttccgtttcacttctggtgatgcttactttgatttcggtttcaactgcacccctccgaatggacaagggttagccgctccggattcatctgcactgggtaacgtttctgttagtacctttgtactggttggaactaaaaaacataaaatggcaagccgtgattatcaatggggcaaaaacccagataagatcactccggaaagcctgttcccgtctaaaaaactggaaagcattttcagccctgtacagaaaaatatcaaatacaaacgtgctgattaccttgcatcattccgtaagctgttaggcgctgacattagcggaaacgatatctttgttgaagttggtacactgaaagttcgtttctatcgtcatgtaatgatgcgtaaaggtgcgtatgtgtttagcgcggtgtatgatcctgctgtatctaagtatcgtccggctgcacaacttcgcggaactatgttagaagacgaggacggcgcttgcctggatatgatcgttgatacgttcaaagagttgcagaaactgaaaccgagtgttcaaggcgttgtgaacgcgatcgataagatgaacgcagagtttgcagcgggacatcgttcagcatcttttgttaaacgtgtagctgctcaggaagccgcgccgaagccagaagagaagccaaaacgcactgttaatcgtatcggtaaagaggaatacttcgcagcactaaaagatattggtgctcgtgtaatgcctaccagcggttatgttgaatttgataacggcgctggtgttactatcaacttcaagcgtattgttgtaaaccgtaaagcatactactcattcagtagctttgatttcacgtactctggtcagaaacacattgagtggttgaaaggaatcgatatcgcagaagataccaaaggcgcaagcattagcctactcactgatactctgaaatctttacgtgggatctctgactggaacactgttaagagcgctttagatcaaatgaattctaacttcaaggcgggtaaattctccgcacctcatgtgaagaaggaagcagagcaaaaagcaccgaaacagaaagacgaaatcggcgcacagcctaccaaaccacaggcggctaagaaagatacaccggaagtggaaaaatcgcaggctgttcatgcagcacgtgagaaagcgaatatgaacaacactattcgtaaaatgatgactatgttagtcaaagcacagcgcaaagacactccggaagatatcaagaaggaagttgatgcagcaattcaattgtggcgcttgacttactaatcaaatgaactataatgggaactgttaacgcagttccctttttatttgaggaaaatattatgagttgtccaacatggttacgtttggaaaatctgaaagaaggtacacaaaaacggatttatattaatcttggttgggttcctcctaccgattttcaaatggctgagattttaatcaatgctgttaaagaagtaagcgacacttacgaatgggaaaggctctattttcctttgattggtttgtatatgacgcgaaataaatttgaagaaatgaaacttgctgttattcgcgctacgattattaattcccaacaaagatttactttgaaaaatgcatggagttctgaatgattattcaagtatctgtacagggtgacactctgactgtcaccgaatccatcaataccgctcttgctgtatgtcgtgaccatatctcacaaaatcctccagtgactgagatcctggaaattgatgtttgggatcagattgggatgatcgacgcatcatatggatttaccccgcgagatgaagaactatctcgtatcgaatcatggctgaatgaacaggaaacggaatgaaactccctaagaacacaacactactaacccgcgaaaaacttcactctgttgattggtgtcctctggatatcatgatttttgatattgaatctcgcgtgatcaatgcaaaatatcaggggtgtagtattttctctgttgaattcgagaagattcgcggatatgatgagaagtacaaagaaaaactgaaagttatgattgaagcattaggctatattgtaactgttgaagacaacaaaatgtggatcgcaatatgagcatagtaaaagcggtgtttgcgctggggcatgatatctaccacgatgatttcgcttttggatatcagcaaggcttgccgtggggccactgtaaagaagatttacagaacttcaaagaagaaaccgccgatagcgttttgatcatgggtgcaaatacgtttacctctcttccgggtaaactacctggtaggatccattgtgttctgtctggttccggtagctttttgaaaaccaaaaaaggcgaggttgctgattacgtgatccacggtggcgggttgtctgctgctattggtacaatgcaagcaacacacccagataaaaatgtatgtgtcattggtggtaaggggttgcttttagattcaatcaataataaaatggttgatgaagtagttttgacacacatttacggacatgatgtatataatgcccccgcatttaaacgcgatgtttcgtttactgcttctgaattgggtgatgcattgttaaaatatgaattttctgatttcgaaactcagtacatcaaagaacatgaacgcattgaaaaaatcatagtcgatcgatataaaaaggtataaaatgaaacaatatctggatattattaaacttgtacttgataacggtgttgaatcaactgatcgcactggtgtaggtactattcgtattttcggcgcacaagcccgatgggatctaaacagaggtttccccgcaactacctgtaaaaaactattcttcaaaccgtgcaagcatgaattgcaatggttcctgtccggttcaaccaacgttgaagaacttcgccggatgacctggggtgaaaatagcgataagcgcacaatctgggatgataactatgaaaaacaagctattgatttaggatatgattctggttatctggggccaatctacggtcatcaatggcgttcgtttggttctctttatggggatgatgatagttattatggcggtagtggtgttgaccagatagcaaaagtcattgaacaactgaaatcaaccccagacgatcgtgggatcatcgtttcggcatggaaccccgttgatcttgatgatatggcattgcgtccgtgtcactgtttctttcagttcgttgtaatcaacggtaaactgtctctacagtggtatcagcgttcagttgatgtcttcttagggttgccgttcaatatcgcctcctatgctctcctgacgcatattatcgctgatatttgcgggtacgaagtgggcgatctggtttggactggtggtgatgtccatatctataaaaatgcggttgaacaagcaaaagaacttttacagcctaaccgttcaccaatgccattaccgattctaaaaatgccgaaggtaaatagcttacttgatttagatcaagaattctttgactcgataaccttagaagggtatcataatcacggctctctaaaagctgaaatggcagtatgaaaaatggggcttcggcccctttcttaacaaggtaagagaatgaatgacattaaagtagtagtaaaatcctctggtgtacgccagccgtttgacaaagaaaaaatacacaaagtgctcaagtgggcctgtgatggtcataatatcgatgttcgtgcattccttgaaaatgtattagaactgatccgcgatggtatgactaccaaacaaattcaacgtatcgctatcaagtatgcagcagatcatatttctgttaaagaaccggattggcaatacgtagcatcgaatcttgaaatgtttgcattgcgtaaagacgtttacggccagttcgatcctatcccgttctacgatcacatcgttaaaatggttgaagcggggaaatacgataaagagatcctggaaaaatacagcaagcaagatattcaagttttcgaacgtgcaattgatcatgataaggattttgaattttcgtatgctggttcccaacagttaatcgggaaatatctggttcaggatcgcgatactggcgaaatctttgaaacccctcagtatgcgtttatgcttattgcgatgtgtctgcatcaggaagaaactgggttagcacaggttacgcatatcgttgatttttataacgcaatttccgatcgcaaactgtctctaccgactccaattatggcgggtgtacgtactcctacgcgccagttctccagttgtgtagtaattgaatcgggtgattctcttggttctcttaacgctgtaacctctgcgatcgtgaagtatatttcacaacgtgctggtattggggttaacgcgggacatattcgcgcaatgggttctaaaatccgtggtggtgaagctgttcatactggtgtgattcctttctggaaacatattcaaaccgctgttaaatcctgttcacagggtggcgttcgtggtggtgctgcaacactgtattatcctttctggcatctggaagttgaaaaccttctggtgttgaagaacaacaaaggcgtagaagaaaaccgcgttcgtcatcttgattatggtgtacagcttaaccagttgatgtataaacgcttaatgaatcgtgattacattacgctgtttagtccggatgttgctaacgatcgtctgtatgatctgttctatgaagctgatcagactgcatttgaagaactgtatgaaagcctggaaaaagatccaactgttcgtaagaaacgcatcaaagcggttgacctgttccaacttttagcacaggaacgcgcacagacaggacgcaaatacattttcaacactcatcacgtcaaccaacagggtagttttacggttcctgttcgtatgtctaacctgtgttgtgagattgcgatcccaacgtcgccgctggatgacgatgataaaatggctggtgaaatcggattgtgtacgctaatggctatcgttctggataacgctgatatcagcgaattcccgaaactcacgcgtattgcagtacgtgcgcttgataacctgctggattaccagaactatcctgtaaaagccgctctgaaagctaaacagcgtcgttctctgggtgttggtatcaccaactatgcatcatggttagcaagcaactattgcgactactcagaagcgtataccgacaaagttcatgagttaatggaagcgtttcagtttaaccttctcgttgcttctatggaactggcgaaagaacgtggtgcgtgtggattgtacaacgataccaaatacgctcgcggattactgcctatcgattggtattgcaaaactgttgatgaactggtagcacctgtttataattgcgattgggaatggctacgtagtcagattaagaaatacggcttgcgcaactctactctttctgctttaatgccttgtgaaagtagttcacaggttagtaactctaccaacgggatcgaacctccgcgcggtttagtgagtatcaaatcttcgaaagaaggacactataaccaggttgtgcctaaccagaataaccagattgatttctatgatctgctctgggatatggctaaacgcggtaacaaagggtatctgtctcatgtagcagttatgcagaagtttgtcgatcagtctatttctgcaaacaccaactatgacccggcaaactatgaagacgggaaagttaaaacagaagacatcattgatgatctgctgtatgctaactactacggtgttaaaactctgtactatcataatacgcgtgatggtgctggtgatgaagaagaagccgcagaagattgcgcgggttgtaagatttgattaatgccccttcgggggctttttaaaggtaaagacatgttaacagtaatgaatacaaacccagatcataaccacttagaacaacctatgttttttggtgaagatactggtgttgcacgttatgaatcgcagaaacacaaagttttcgaaagcctgacgcaaaaacagctttctttcttctggcgtccggaagaagtcgatctgtctactgaccgtatgcagtatgcaaaacttcctgaacatgaaaaaatcattttcgattctaacctacagtatcaaaccctgttagataccattcagggacgtgggcctaacctcgcatttttgccaattgcatccgatgtgagcatggaaacctggatcgaaacgtgggcgtttagtgaaaccatccacagccgtagttacacgcatattcaacgtaacttgcacattgatccttctgtacagttcgaccaaatccttcgcaatgaagcgattatgaaacgttctgcatcaatgacacggtattatgatactctgattgatgaatgtcataagctgaaaaccatcatgatgctacaggaacaggttagcggctataaaccaaatgatccggctgtcgtgtattataacgagcaatacactaaacaggccactaagtgcaaagaagctctgtacctgtgtatgcacgctgtgaacgctctggaagcgatccgtttctatgtgtcgtttagtttcacctttaactttgctgaacaaggcaagatggaaggcaacgcgaaaattatgcgcctgattgcgcgtgatgaagcattgcatcagaaaggtactcagagtaaaatccgtttgtggcaaatgggtaaagatgatccagaaatggttgaaatctcccgtaggctgaaaaaagaagcaacggctatcttcctggaagtatatgaacaggaaaaagaatgggctgaacatttattctctgttggtgatgtagaaggtgtatcgctgaaaagcactatcgcttatattgaacaccttacagatcagcgtatgcgagcggtagggcttgattcgccattcaccccgatccctaacccgtatccgtggatgaataaatggctcaaaagtgataacgtacaggttgccccgcaagaggttgaagtaagttcttacctcgtcggaaacttgaatactgaaatcagtgatgaagcgtatgcaaaatgggccagcaaatacgcgtgattgtcgggtagtaaacaagtacaaaactgattgggatgtcgatattcaaagaggtacgaagttcggcaacccttatcacacaggaaccaggggagaaaacattttagcgtttatcccctggttccagaatcaggttcgtactggggcgatcacgattgaagaattgaaagaacttgatggaaagaggcttggttgtacctgtgcgcctcttccctgtcacggtgattacatcgcgcatgtggttaatgttttgtgtggtaagaaaagatcacttgactttttggatatataatgtatgaaatctgaattcaacttaacccttgataaatgtggtcgcatcgatcgaagttttgttaagtgtggtgaacttaggcattgtgtttattttattgcaattaacgatgaaatagtatatgttggtaagtgtagggatatgtggaagcgtttagatacatatcgcaatgcaaagtattggagagaagccaaccccagcaacatcttaaaaacgtgtcgattggaaatggctatcaaaaaacgaaaaactgtgaaacttatcgtgactactcacgatgaaaatacatatcatgattatgaaatcaacatgatacgaaaatacaaccctgaatggaataaacagcactatgacaaaggcacaaactaaaattatcaataccctttacaaacaactcatgcagttgtgtggtgaatccgaaacatttttcttcgttgatcaagtaaccgtgatgggtacacctgttcgaatctttaactatcgcatggcctcatatacagactggctaaagcctggtgctctggaatgtcgcggtatcatgtttgaaatggatggagatacccccgtatcaatcatcagccgccctatggagaagttttttaactatgccgaggtaaaggcatgggaagcgcttaacgagtctcctattgaattaggcgaagttttagacgtgatgattaaagaagatggttccttgatctcaactttccttgacggtggatttctggcggtcaagtctaaaggttcggttaaatcagaacaagctatggatgcgcacagcgtgttaatggcaaatcgtgaattgctgacccgcttaactgagatcgctaaagaaaactatacggtgaacatggaatacgtttccccgaaaaaccgtattgtcgttggttatgattctcctgatctgcgtatcctgaacgttcgtcacaacatcacgggtgaatacatcccttatgatgaactctttgctgacgcgctgttacgtgcgtatctggttaagcgtgagaatatcgaagtactggatctggatgcattcgcaaaagaagcatatcagaatgaaggattcgaaggctatgttgttctgacaacgaaagggtttgtaaaaatcaaaacaaactggtatgtcaacctgcatcgcacaaaagatagcatcaccaacaataaggatcttttcctaaatattgttgagaatacggtcgatgacctgaaacagctattcagttcggatctggtctctctgaaaaagattgacgatttcgaaaaacttttccttgatagtctcaatcgtttgagtgcaaaagcattcaaagctattgaagataataaagggaaatcgcgtaaagattttgctatcagtctaagcgcggatttgtcaaacgacggtcggatcatcttcgggcctcttatgaagtacttcgaagaaaccgatccacaaaaactggtcgatcgcatcattgaaatgatggttaaaaattacgatcagttcattcctgaacaatataaatgaggttcataatgcctaagatatcatcttgggtatggcctgtaatcgtggggctatctttgatagcccttttttacattgcagtcgataccaaaattgaaaatgcatcattacgcaaggatataaaatctttgcaagacgatgtgaagaaagtaaaagagacaaatacaagcaatactgtgatctatgtcgaacaaaaaggtaaggatcagcagttggtcaaggatgccggacgtaaagatctgctgtttaaaaaaccaggactgatcgaaatcaagatcaacaaatccttcgaagagtatatggcggaatacgacaaatgaaaattgcaacgttagcccttgttctgggcgttctgttggtcgggtgtgctgagaagcccccagaaaagattttgcctacgctccccgctaaggtgaatccggtgaatgtgaaatggaaagtggttgcagaagtccgagagattgacggtaaaaaataccttgtaatgccctatgacggaaatccttatgttgcattatcatatccagattcattgatttttcgtagctggatgaacgacgttaaaagacaaaaggatcagaccgataatgttctgtgtactttgggataccctgagaaatgcaaatcaaaataaccaaaacattttttcgtgacataacagaaggaaaagtttatactgcgaaaaaggataaagaaggtctatggatagaaaacgattggaatcgtgatatatggctcaatctgacgaatgagtataacaaagaactaattgaatatgagatagtgaaatgaatctgtttatgactattggcgttccgggtagtggaaaaactacctgggcgcatgagaaagcccgtgaattgggtaatactgttacgatctctcgcgatgatctgcgtagctctttgtataatgcgggtaaaggtgctggcggatacaaatacaccaaagcgaaagaagacatgattgcagaaatgcaggatcacgttgttatctccactctgaaagatggtaaaaacgtgatcatacacaacacacatctgaaagaaagtgataaaaatcactggcgtgaaattgcgttggaacacaaagctgattttcatattgaatattttgatgtgtctattgttgaactgcttcgccgtaaccacaaacgcggtcgtgatgcattacccgtttcgcgtctttgggaaatgtttaaccagtatcgtaagatccgtgggttcgtaccagcaatggaaattgttaatccccacaatcagaagtgtgtgatctttgatgtcgatggtactctaaccaaagtgggacaacgtagcccgtatgactttaccaaagtgatcaatgatccgccaaatatcccgatccagcaactgtttcacctgtacaaaaatgcagggtataagtgtgttgttgtgtctgggcgtgaaggtaatccgcaatgcgcacatgatacatgggttagcctgttgagttatggcgttgaaccggatgaaatttttatgcgtcaagaaggtgataccaggacagattttgaagtaaaagaagaaattttgtttgacaagattttagataagtattatcctgttattgcagtggacgatagagacactccggtcggaatgtggcgagcaaacgggattccgtgcttacaagtcgattatggtgatttctgattgacatataatgtgggtatgttaaagtacccacacaaaagaggattatattatgaacgttattcgtgaagataaacacatcatggttgaacttggcgatcgcattcgcgtagaaaatctgggcgattttaaccaaaaagttcgtttgttgtgccaaaaaattgctaacaaaattcaggaacagggtaaagctccgggcgggtttgaagttagcgccactccggtttctcagtactcctatattgtgtatattcatgacgtggatactaacagcacccaatctttcgggctggtgttaaatcctattactggctacgttacatgggcggctgtattatgaacgtaaaaattattgatagagcggtaattacggacgaatctgtatacccggatcctcgttattatggcggtgttttcggatacatcaaaggaactgatattgatgtagtaacaagtccgattgcagaatatgatatcaacaaaaatcagacagaagttcgcgttactacaatcaacggttcagaatatatcgttgaagcgactcctgattttatcaa

SEQ ID NO: 23 - DNA, 176032 bp, Unknown
  bacteriophage strain capable of infecting bacteria of the genus Klebsiella
cgtaggttagaacataacacgaataatgatttgctagactcatcatgatatcgcgataagtttcaatatcttttttaatcgatactgaacggtctttaaagcgatctgcaatgtggtcagcagtagccgctaccttgattgtataccagtcacctaacgcgctagtaaacgcctcgctaacttcttttcgtacactgttaacaagatacattaaacgtgttctgttcatataatcctcactgatttttgaagtattcgatctgacgcaaacgcttttcagcggcggctttcgaatcgtattcaccaagttcttttgtgcgatcgtgattcaaaacaacccacttatcgccacgctgttcaatgtgttctgtaatatcttttaacgacttatccagatccagtgattcagcctcttcacagataatagtcaaatccacgggcagtgtcaacaaccttttcactccgctgatatcatcaagcatcgaatcgtatgcaagggttacgtgcggtttgtaatccggataatcgtatgttgcgccagcatcaatagaatctttgaaacggctatgcaggtattcagattccaggatccctacgatagtgctaccgtattttgtgtcccacttttcaacatcaaccagtttagcaggttctgtgatgtcctgttgcgggaacaaatcaaccgttttccggctgtatacgatcgttgtatgcatcttttcggctgaaacagcattctttgtgatacctaatgtcttttgaacatttttcaaagcctcacatgaagcctgatcgaatttagcacacatgtagataccaggatctacaacaggttttgtgatttcaagaaatgatttcataaaacaccccaataaaaaaggggccgaagcccctttgtaataaatttgtttttacgcttcttcgccaaaggcggcttcatcttccgcgcctttttcgacttcaacggaagggatcagagcggataccgcgccaatcactgcttctggggttactggctggcttgcgtcaatacccagtaccgaacacaggtcggacagaagttgacgatgaaccgacagttcactttctttttgcgcgataacttcgttaagatcgaatgcgcggcctttcagtaccagtacttcattttgcagtttttgaatatcagacattttattacccattgttaaaatttaaaagtatcgagcactttgctctttagttgtttcaaagtaccttcgttagtgatgatactatctccaggttgaggtgtcaaacctttttccgtggaatgttcatcaacaattccggtatcctttacaataaacacaaacttagcacccaagcgtttcaggtatttatattcgtgttcctgacgacagtcagttaccagaagatgattgtattcgtcaccagcatatttattgacgaatctttccagtgtgtaacgaacccaaaccgtgttatcatacttgcatactatatcagttccaaacacttgcatcaagcgtctgatactccagggagtatcgttactcataatcagattatcaatatcatcaggactataaacaatattgtatccacgttctttgaggatttcaagcccgattttgaaaatatttagaacatcttcattagacatcacaagaggtttctctcgatcaccttcgtaaaaaatagcatccggatcagaatattttccttcaaccagactacgaatgtatggtttagcgtaaccatatcgctgcattgctactcttagcgttcttttgataccaaatgccagtgcttcacactgaacatcattgtacgcctcttgaataaatttagcaaccgtatctttaccagttcgcttttttccactaatcacataaatcattagctcattctcttttgagaagtgactacttttccgtcaatttcaacttccatatgaaggaagccaaaagttgccatacacgtaaccgcttcatcactatcgttagtataacccaattcaacctcacccaagtttgttgggaaggcaccataaaatctaaatgtggcgatcgttttcatctgggagttatccaggatatgcacagcgaatgattgcttaggatcatcccacgcaacagagttaaactcgttgtaatcgtttgtgctcaacatccatatgtaaatcccaagatacgatctcatttcctcatcgactacaaagcggatcatcaaaggatcaaactcaaaagccgaaccaggtactttacctcgaaccatcatatttgcaggaatatcaactgctgggaggttcattgatggtagtgtaaccccttgaacttgtaaagtcaaacctttcatgtaactgttatcaggaatatcaacccgaaagtttgtaggtgagatttggtttaaaatcatttctgtagacataggatctcctttcctctatttagcggggaacgggatcaaagcggcctgacggggtaatataaaaatttgaagaaaatgcttgaccttttaaaatctttgatctataataattattaattaaaattttatcaaaaagatctaacaagatcaagtaaaatttaataaataatttattaaaaaattttagatctgatcttgaattcataaattttatgatctataatatattaatattttattttatcataaatttttatgaagatcaatacttagatctaataaattttatgctttttctgaaaacttttcctttaccccgtcactaaatactggtactatgttcccatattggaaatcaggaaaaacaaaatgactcacttgaaaaaattcaaagaatttctgaccgaaggtaaaaccctcgctcgtaccgtagcacgtggtcaacgcgctaaaacttccgataaacattcaatcggttttcttcacttcaaacatggttctgatttcgaagttttagcaccggattctcacgatctggcatacttcggtaaaaacattgtacgtttgaaaggtatgactactggtaaagttcaagcggcttatgtcgattgggctaaaggtactgtttctttctacagtggcaatccggatgatgatctggatttcgacaaaccagaaaaattcaaagctgctactctgtatgaagaggcggaagaaaatctggatctgtataaccagttagcagaagatttcgaaatcgagatccctatggatgaagctctggtgaaaggtaaagtttacaaactcccaagcaacgatatgcgtcttctgtacactgggcgttctaaaactaaagcaagcggtgaatatgcagtgtttaccgtagttgatgcttccggcaaacctcgcctagtatctggtaaaaaattcacccaggaatataaaggcgatatggtttctaaactggttctggctgaatccgaagatctgaatgaagcggctaaaggcattcgcgaaaaagttattgctgtgatggtgaaacgcgggtttaacgaaaaagatgcagaaaagatggttgacaaaaacctgaaagatgctatgaaagttagacctggtgcgacccctggaaaacttgcagaaatagttagcaccctgtaaaaataaagccccttccttccggttggggctttttgattagtatttgctccagacttttttcgcgccgtaaggtttccctttggacataaattgttgagtcggtagccaaacagctttcgcccaatccttcggggcaatctctgctaatggtgatttgaggtgtgatggtagatatgctttgatcatttctgttgcgcctcgcatacctttcacgttaccccagttaattttgagtacagtcttgttagagaggcgtttagtggatccgtaccctcgcttcaataactcttctaaaaactcctgtcgtgctctgggtggcgcatagtgcaagttcaaaccatagaacactaagttacccgctttcgatcttccggatcctaagaaaataatcagtggaaatctatcccaatacggcagggtgtctttatattttgcatcatatgcaaacgtgtacaggcgacccgttgctggttttgccacacggtgtgttttgatactggttttgatgaaattaccaaaccattctgttgaatctttctgtcgctttgccgctgatacaccaacagtgatctttttcagactattacggaaatcgttgatgatctcgatcccgtgttttttacggtagtcattacgttttttacgggcttctgtctctgcggaacgtcgttcaatctcatcatcaatctgttttttgtaacgatgcattgactttgtgaacgttgcgtagtttaatccctcagaatcggcaaaacgtttagcagaaacacctttcgtttttgccttacggaatttgatccccagttcaacccaatcactcaatttgcgtttgggtggtgctttgggtttatcctcttccgcgatgatctcaaactcaaaaataaaactcatgtttccctccagggattactgacctcgccacccaaaaacttttttgagtgattcttctgttacgattttgaactgccagcctttttgacggcatagctcatttgcggctttccacttatcaatattaactgtataggtgtaaagagcatcaataaatttctttttattgtgtacgttgttgtttactggcttcggtggaggcatggtttctttaaggggcttaacctcccaaagatatgtagtaccattttccatttccacatagaaatccatgtaatagcgtcttctcttaccgtctgcattgcagaaatacgggatcactatacattcagaattccaacgttttacgtgtgggtttttatccagccacttcataacgtagcgctcccacgatgacctatacgtaatctttcgcggatcgcctttatacttctgtatgttttcgggtacaaacgaccctttatacgtctgtcttccagccattgcgtaaatcctaaatagaataatataacgtttagataggggaacttatcgtgctattttcatacttcccgcctgttgattacaaaggcacccagacaactgatattttccgagactatcgattttattttaatcgtgtgattggaaaatataaaacccgtagttaccagataacaggcacactacgacctgaacaacttgcagaatcattatatggaaaccagcaatactactggatcctgttgatgcttaactctgtttatgaccctttctatggttggatctccgatcaggaagccgcgtatcagtgcgctatacagcgttattctgaggttggcggtgaacaggttctgtatcatgtagatgaaaacaacaacaagtattataaccttgtcgaagaccccaataaccctggtcattggtatgacaaaggtgacaaaccaatgctgtatttacagtatcaaggtgtattagctcctgtagatatttatgaagatgcagtgttgcaaaatgaagcaaaacgaacaataaaaatcattagtccgtctgacatccaggcgtttctgaatgattttattaaagaaatggaaaaggctaactcatgaaattaggcggaaatttacactcccctttctttgatggggtggttgaaaacgttgatgatccgcgcgggttgggccgtgttcaagtccgtgtatttggacaacacccagcccaaaaacaaaaatccgatgcaatcggtgttcctgttgaagatttaccctggatgatgcctattcaggatattagaagcgctgcgatctctggtgtgggcttctctccaactggtatcactcgcggatcctttgttgttggttattggcgtgacaaatggcaccaagatggtatgataattggtactgtcgctggtgaatatgtcgaacaaccagacacacagaaaggtttttgcgatcctatgggtgaataccctcgctatgttggtaacgatgttaactcccttgcattaggtggtttgaaaggcaaaggatcatcaagtgtcatcattcgtgattcaaacacaagcatagcagtaaacccagacgatcgcccactggatgagataccagaagataaccgccctgatacgggtggatttacgatcgaaaagatgctcaaacaggatgaggggatccgcacacgctggtatacagacagtgaaggatatccgacaattgggatcgggcatttgcttatccgcgaaaagactcgcgacactgcaaaaattaacgctgcgatcagtaaagcggtaggtcgagaagtaacaaacgggacaatcacggcagaagaggtatcaaccttatttgctcaagatttagccaaagtaagatctgatattcagagaaccgctaacgtccgtgaagtgtatgtgaacctcaaccgtcctcgtcaaatggcgatcgaaaacatgtcgtttcaaatgggcgtcggtggtgttgctaaattcaccaataccctaaaagcgatgaaaaatgaagattggcaagcggcttataatggtcttcgaaattcactgtgggctagtcaaactccaggccgttcttctcgcgtgtctaaaatcgtcctcactggcaaccttgaatcatatggggtgcaagtaccagatccggaagggcgctctctgagtgctgcttacgctgcgtataacggtgctacactgttggctgctagtccggaagatccatttactcctggtgatacccgtgtgatgtttgaagaaccagcatcatcttataatgcggaatatccgtataacatggtgtttgaatcgagatccggacacattcaggaattcgatgataccccaggatacgaacgatataaccgtgttcacccagcagggagttacgaagaaattcgcccggatggaacccgcgttgttaaaatcgtaggggatgattatcagatcgtgatgcagggccggaaactcaacgttaaaggcaacttgcaggtagttattgaaggtgatgcgttcatttacaacatgggtaacgttcaacaaacggttgatggtaacgtaactgaatttgttcgtggaaacgttcaacaaacggttgaaggtgagtacgttggccttattaaaggcaatgctgaactaactgtaaacaaagatgcaacagttaacgttgatcagaatcttaccgcaaatgtgaaacagaatgcaaccgtggctgtaacagaagacgcaacggtcactgcaaaaaatgcgaaaattgagattgaagaaacgatggatatcggtgctaaagatatcaatatcaaagcaacgaataacacgtttattgattctggcgcattaacaaaaatcactggcggcaccgtccaagtggggtaattaaatgattatggattatgaatcaataattgatggaattatgcaaaattatcagcatccttgtgatgctgagatccccgctggctattatcggcgggttatctggcaagggcatacagaaaattatccggctgttggggttgagtgggataccgagataatcaaaatcggtactcatctttatactcaagaaccgttcggacatagaagcacggatctacctgttgtcaattcaccaggaacagatccaaataccggacaaccaacagggatccttgttccaaagatcggttattatttcaacactcaagcagaaattgatgcttacattacatctattggtgcaactaaaatcaatggtggtaatgattggtatggcgcggatctgtcaaaatcaaacctatacaaaaaccctggcgaactggctatgtataaggtcgaaaacagtggtggatatctttccggaacaaaccctgtatgtgatgctcgcatacgtcagacgtataatcaggacactggtgcattcaccaatattgattattattggaacggtaatcgtatagcctatatgaagcatgatgaaacaggggcgcaccagtgcaaatatacgggtatgcaggttaacaccaacgcagatacaagcattcctcctgttcctcctgcaatgccttccacttatggggcattaccgagtgaattaagccgtgctgatatttcgtgcattccggcaactgttggtttcgcatatacaaatatcagtgatgctatgttacaggcatggaatgaaacccgtcatacgttcaagctacagtttaacatgttaacgggtgctgtacagaatggattcgggatcgcgacgatgtttgatggtttatccgtatcgatggaagaagtaatggcgggggcgctcgcattgtcacagcaagcatggcaaactgctatgaaagttttcagacaagtgattagcgctgcatttaacattatcggtggtgcatggggattgattaatcagttcttgcctcaagtaaccatcttaggtgttgcgatcaacatttacgatctggtgtttggtgataattctgttcagactttgaaagatgcatttaatgcaatcatcaaatccggacaacaaacatatgaaaccgtcataaacgcaatatacggggccataggaagcgcatacaattactctgtggaatatgtcaaagctggcgctcgcgaccttgtggatgcgtgtagcgcgttatttgattggtgtttaacgatgttccaaaacggttgcgttgcattaatcgacttatacggtcggatcatgcaaacatgggctatccctccggaagtcccaaacccgttatggtctgcggtgctggctatccgtaacatcatgatgcaaatcaaaccacttgatataattctgggtggtaacttccctggattcactgcaatggatttgtatcaacaagcacaggaaaaagtcaaggcttttgttgatgagtcatatgaacagatccgagggctttatgaacaggggcaggaactttacaaaacgttaaaaaatcagattttcgaacgtgatgcaattcagagaaaattcaaccagtacttaaactggatgtggggcgctgtaacagacgaagcaacagcggcttatcaatctgcattggatgctgcaaacgctgctgtagctgcaacacaggccgcgtatgacgctatacaggaacagattggatctctacaagatgcaatgaaagatacatacagcatggcgatggaagaattaaagaaattgcctttgatgagtacaataaacgagtttttaggcttctgtggtgtcgcatttgacgatcttctcaagtcatatgaaaatgcgattactggtgctcagtctctgtacaaaaatttcattgatagttcgcgctcgtttaaagatcactgcaaagtaatctataaccaaatttgtacgttggcgttgagtaaagtcacacaatatgtgaataaattgctgtctctcataggattagcaatcaactttggttcgattagtgtatgtgttccagtactgaaatactaaatagtcgaatgatcaagaggaatttataataatggctactgctaagactaagactgtcaaaaaacagattaaccaaatccccgatatctttatcgggggtactttcgaagaaattaaatcggatctgattgattggctgggtggacaagaagagtttaaggattacgatttttccggctcacgaatgaacgtactgatcgaccttctgtcgtatgctactctttatattcagcagatgggtaacacggctctatttgaatcgtttattcgcacggctgcgttgcgtagttctgttgtacagtctgctcaagaactgggatatatgccagattcgcgcacggctgcaagcacagcagttatgattacggctgctaacccactgaccccaacatcgatccgtatcccgcgcggtacaaaattcatcggtactgtaaagaatacagacagttattcttttgttgtatcagatgacgttgttatcgttcgtgatagtaataacaactatacatcaatgctgaacctggtgcaaggccgtttagttcgtactgaactaatttatgacggttcgagtatcctgatccgagatccaaacattgaccgtagtcaggtacgtttaactgtaaacggcgcacaatgggaagactggacaaacgaaagcattgtaaacgcaacaggcgcaagcacgatttactacatgcgtgaaactgttgatggacataccgaagtttatttcggtgaaggtgaagcaagtcaacaagtggctggtggcgcactaaccgctgaatatatcgggggcttgaaacctgctaatggttcgactatcgttattgagtacctgtcaaccgatggggaagcggctaacggtgcaaaagattttatctatgtcgatacattaaccaatattagcatcactaacatcgaagaaaacccgactaaatcccctgattatgttggtgctgatggtggtggtgatccggaagatatcgagcgtattcgagaactggcccctgttatgcgtgaaacacaacgccgttgtgtaactgcatcggattatgaatcattcttgtctcacagatttggttctatcatccaggcggtacagtgctttactgataacgaaaaacctggttatgctttcatttctgttaaaccaaagtcaggtttgcgcctaacatcggtacagaaagaagatatgcaaacgtatctttcgaaatataacctcgcgacgatcaccccgtcgattatggatcctaactatctgtatatcgtgcaatctgtcaaagtaacgtatgatatcagtaagttgacggaatcggaggaatggttacgcggtcaggttatttcatcgatcgactcttactatactgacaacgttgaaattttcaacaaatctttcagtgtatctaagatgttgacttatgtcgatcagtctgatacttctattatcggttcggaagcagatattaaattgctccgtgaaattgacaactattacagtgctcctatgtctgggatccatttcttgaaccaggtggaatcgaaatcaatcatttccagtacgttcaaattcactaatgaagacgacgaaagttatgatgttcgttatgcttctacggaaatggatcaggatggtaacgcaaaaattgtaataggcccgttcaaggatggggatatttcgatcgctgcttatacaggcgatgactttgaaaaattaacagatgcaggaatccgtaataaatattacgaagttggatctgtttctcattacaccgatttcattagctttgacctgggcgttctgaacgtatccgccgatagtttcagtgctgcttatatcgagctaaccgcaaaacctctcgaagagacaatttttactcgcgatggttcgttgatcgtgtttgaaaatgacctgcgtcctcaatataccacattgactatgaatcctatcagtcaataatctttaacccctgtcttcggataggggtttttctttttataaatacgtgatatacataaccgcaaatttggagaaatataatgattaaagcgccttcgattacgagtttgcgcgttgataagctggctgctaacttcgtttaccttaaatgggatgatgttggcatggatttctattatgtggttgaattggcccgtagccgtgatatggacggaactattattccagacgaagatttaatctggagtcagttgggctatagctacgaaaacgaatggtttagcgatcaggttgccccaaatacacgttataaattccgtattcaaacaactcatgaagggtttgacccttctgattgggtgatcagcgatgaattatggacgtttgatgagaacgcctacgcatatacaaccatgcgtgaattcacccctgctgattcgtttatcaatgaaaaattcgccaaaaacaatcgtgattacgtcgattttaacgatgatgttattatggcttctctgatggttgaggattttgtatactctcccctgtattctgatgtaagccagatcagcgataagatcctgaaacaagaaagctaccacgaaattcaagatcatatcgaacacgtttgtaatgatatagatcgcacgttcctggtatactcaaacggattgctttacctgtttgaacgttttcagaatatggctaaagtgtcaaatgacaaaggccaaacgtggtattactacaaagcattaaacgatcgtgtaggtaatccggtttcccgtaccgttgcttatcagagcgctaacactacgtatgtgttaggatacgatcgcatattttacgggcgcacgtcaacagatattcgttggtcttctgatgaagttcgtttttctgctgatgatgtaacgtttgcgaagctggggaaccagtcagggttagattttgatgttgattcatacaacacgtatgcgcgtctaccgggcggagtgtcgaagtatgccgaagctatggcttgttctagtgattggctctacgtggctgctaagaacgttatgcgccgtattgcgttacgtaacacaccaattgatactgatcctggttctccgacctttggtgaacgtatttttgatgaagtttcgtataccatcgtaccaggaaatgataaaattgttgttaaaaaaatggacgtgctgaatgaccgtctatacgttctggtaactggtgaagttaaaacggcgatgatggatccgactgtcaaggctaacgtgatcccatcaaacgatgctggcgtttatctgtgggatgagaatgcaaagacgtttacccgtgtttatggtaaaaccgaagatgaacgtttttatatcactcatgaatataccaatatgtcaaccaatggcgatgaagtttacatttctgttggtaactacaaatatccaggcactttgccagatccagatctggttgaaaagtatccggaagatgtgcattcagcagtgaaatacgatcttgttcctggttatactgcaagcatttcgattaactttgctacagttcgtgcaaatcagaacgatcctacagtatggaactttgggccgcaagagtactacaatgaagcaaactttagctggcatttccgcgataaggttagcacatggatcaccaatgataaccgtcctctggtggtttatccggaaaccctatatactctggttactgatagcgcgtctcctgcgtcaacgattcgtgtaaaccatgaagtttgggacaaaggaacagttactatctacttgaataatatcaagtttactggttttacgaagtacacaaacggtgttctgttgtatcgctcaggtggtaggataattggattctatgaactgtcataccgcgcaagggatgaactcactattttctggaaaccagataacactttaatggtggcaagtctggttaatcaggaacgtgaaaacccatacacgccggatattgaacctggactaatagaccctgatctgagtcacatgatcactcgttttgctccgcaaagctatctggacaaccaacagttcgaaaaatttggtgaatattatctgcaatacatttcgttgggaagcaacagttactataacaaattgctgaacctcatccggaacaagtatccgagagagaaaaacaacgttgaatatttgtggtctgaaattaaccgccgtaacatttacctggataaaaccaaacgtgaggcagtggttagatttttcgaatcacgtgcaagcgatttctattcaacaaaagggattgaggcaagttatacgttcctgtttaaattactgtataacgaagatgtttccgttgagatcgaaagctccaacagtctcgaatatgatattttggttagttcaacaaatatcagtcaggatatcgtaggccggacgatctatacaccaactggacgcgctaacgttacatacatcgaacgtgaatatgaaaatggtcaattgcgttggtcaatgactctgcataatgctcaaggtaactttatcgaagggcaggttgtcaagtcagaaaaaaccaatttcaccggaatggtaattcgtggtgttcgtggtaaacaaatggctaacaactcgatcgactatataaaccgtggacgctcttactacgtgatgaaaattcgttcaaatctaccgacttcccgttataaggatgacgtattgaggtttgttcatccggtaggattcggcttcatgggtattacgatgttaacagtattcatcaactctggtttgtcaatgactcataacgagacaatcattgatattctgagaaactaccgtttcgatagtggttatcctaagttctggcctgatcgcattgcgagcatggacggtaacggaaaccaacaattcgacctggttactggtgaacctctgtacaccgcacacccgcgagcgggggaaccttttgatgtacctccggaatatgacgttgaagaaaaaccgcttaacggtgttcttccttctgcgcgacggttcgatcaaagtccgttgttcgattgctcaggcgttaaatattcacagttccgtaatttggtggatagacgactgaaagatgatgcaggaaacccacgtgatccaaatcctccatcacagattaaggtaggaaattaaatggcacaacaaaacttgtatcggtcggtaattactgcaaaattccgaaccgaaaacttgatgaacttcaaagatatgatcggcgatgccgccgatctaaacacgatttatatgtctattgggcgaactgaatcatgggcggataacgaatccgaccctaactttgccccgccatatccaaatgatagcaccgatggtgttagtgatatgtggacgcatatgatcggggctactaaagttcctggtgatatgatagatgcaattttaccacgtaaagactggggtgatactcgctatccaaacccgaaaatcttttactttaacgatattgttgttgtaaacaccgcgccttataaccgtactgatccgggtaaaggttggatggtttatcgtgtagttgatgttcctgatatcggttcttgctccatttcgagcattaccggaaaacttgaatgtatcaggatcggcggtatctggagtccgtctcatgaatcgagtgaacctccacgcggagaagctaacgggatcgacatgggcgacggctataaatgggaatacctctacacaatcccgccagatgtcgtgatcaaccgctgtacgaacgaacatatcgtagttcctttccctggcgaactggaagaggatccggtacgttggggttatgataacgtgattcaatggtatccaggacaatacgatctagtgtatcggttgaaggtgaattcaatgcgttttcgtgcatacatggattctcttttcttcccgcaatctacgcttcctggtaacaaagggttccgtcagataagtattattgtaaacccgttgattaaaaaggcaagcccgaccgaacctgaaaagaaagcaactggtgattactataatgctaacgcgcttgaacctgattccggacgtatgatttacatggaaaacagacaacctattattcgctcccttgatcagactgaggaagtgagtattgtattcgaattctaaggaaaaacaatggcttaccaaacagcaaaaaaactaattgatgtcggtgaaatcggcaacccatcaacaggcgacccgctttatgatggtggtgttaaactgaacgaaataatcaccaacgtttataatgcgtttggtgatgtgcgtatgctgtctgcaaacgaaggtgtcggtaacatggtgatccatgctaccggatactatcagaaactaccacgcacttactattcaagcacaccgatcgaactgggttccctgcatgacatggatacttcaacaggttcgattaccgttgttcttccttctggtaaggttggcgaaggttgctacttcataaatagtacgggtagtgtctctgttgatcgtcctatcgcgtttcgtcctcaagttggcgatacaatcgcgggggttgcagaccagttgtacatcacgtcaccttacacctttgtaaaaatctggtgtaccaaaaaagaaggtgcgatcacaacatgggattattctgtagaatctatgttcggttctaaaacgatgcctgttgacactacggcgcttgtactgaaagcaaacccgactgctattcctatgttcggatatagcgaatttagcggggctaaggtgctcgtatacgcagaaaacgtagctggtacagttaccaaaatggcggaagttttaatgaccgtggatcgtgtaaacaaaacgatttattcaacggaatacgctattttgaaaaacagtgaagatgaaatgtttacattaaactttactgtcggtgctggtgatgtcgtatacgctaacgtgcaagcgatcaaagaagatcgaattaaattcacgattaaagcaatcgatacgattaaatcagggatcgcgtcatgaaacaagaaattttaataggtcaggttgtagacgatggtacaggcgattacctgcgtcgaggtggtcaaaagactaacagcaactttacagaattgtataacatgctgggggatggtgagatcccccatccagcaggtgcatggaaaacctttgctggtacgacgctatcaccaaaatttggtgaatcatgggcgttgaataccagtgcaaacaaaatcaccgtaaacctcccgaaaggcggcgtaggcgactataacaaagttattcgtctgcgtgatgtgtggtcgcgttgggctaccaacaacgttagactgatccccgcaactggtgatactatcaaaggttccccaactcctaaagatctgtttaaagattttatggatgtggaattggtgtattgttctccgggccgttgggaatacgtcgaaaacaaacagattgacaaaatcacaacttcggatctggcaacagtagcaaaagaaacgtatattgctactcagggacaaactgacttccctaacgtattcggtgttggtaatgaatacaacttgcaatcgttcgaagtttactatcgcggtaacttgctgttcatcgatgagaaagacggattcaatgctgataattcagactatggatcgattggttctgctcctggtgaactggttgcgcttgatggtaattcagtacgccttaaaaacccgtgtaacgctggtgatacgcttcaatttgttacctatctagatgggttagcaacatggcgatcgagctatgaggcgtatgtgatgcgcatgtatcagactggtgatacttctctggaaaccgttcctggtgaacagtgggtaggcgatctgacaaccaaaaaagagtttacacctgctgaatttggtgttaaccctcgcgtgttgattaaccctaactcgtttgaactgcttctcaacggtaaacaactggttaaaggcggtgacgctgactatccggcgttttcctgtgaaggtgcggaaggtgttgatgaaagtacgtgtgttggtaactctggtgtatgggttccgtcaggacaggattatagtttagtattcactgattctgtagtgacttcaatcaagtttgctcaggaactggaatccggcgacgttgtaacgattcgttggtttaacaatgatattggtactctgatggattgggaaggaactggcggtattaaagaaaaagctgataaggtttatctcaataacgaagaagaagttatattgacgaaccgtatcgaatataccgattataataacccttctcagaaaacaatgcgtaatacaggggaaacctatcagggacgtattctggatattcaggctatgtttgatattatccacccgatcggaaccatctatgaaaacgcacacaacccggcaaaccctgctgattatatgggatttggtggttggaaacgttacgcagaaggttatttcctggctggctggacatcaaatgcagcggatcctgatttcgcattaaacaataatgatttagatagtggtggtcaaccgagtcatacggcaggtggtacaggcggtgatcgtggtacagaaatcaaaatcatcaacgttcctgaacttgtatcaaaagataaagttctgattgctgatgaaaatggtgctgtgatcattggtggttgtcagttagatcctgatgcttctggccctggatacactaaataccgtgaggatacattgaaagtgaatcatggtaacacattacctgataaaatcaaaactattccaccgtatatgactgcacatcgctggataagggttgcataatggcttacaacaatatttcaaaaacaagggagggcgctcgcgtcctctctaaagaagcagattacttacagtatgatacttatggtaagttgcctctgatcggcggtaaacgttcgatcggcgaaccaaacattgaccaaacaaaacgcggtgttctgtatggaaacgtacaatccgcaattgatgacctgtatacgcttatcgagcaaatcccgattaacggcgttgttaccatgactgaggatgcacctccaatcgccgtacagcaggttgagagcgtttcttttgatggtattgtacagaacatcgattcagaccaagaacaggctgtagttcacgtatacggcttccctttcatctttgataatgggactaacgccgcaaccgtttgtgaaacggcatacaacaaatttactgaattcgttgcagcggaaaaatatttcgcagaagttaaccgcaaaggtgttgatggtacgatcctagaatgtcgatttattgatagtgttccgcacccggcaacaaatatctcagaaaacggtattcgtcaaatcggaactatcgacgtagccgcaaaaaatggctatggttcatgggttaagttgggttctggtttcttacctgatgttactccgcaagtaaccgtgtattacttcaaacgaattgcataaggataacacatgagtaacaatacaatcaaccacgtaagtgataaatccatttacgtgacatttgacccaacaggtactgattggcctgataccataaccaacgtacaagatgcgttggaaaaaataggtagttgggcgcgtactgatactgggcttcctatcgcaacaacttctgttcgtggtattgctcagatcgcaaccgaagctgatattgacgctggcacggataacactaagattgttactccgaaactgttagcatatcgtatgcagaaccctaaagcatcacaaaccgtatggggttatacgaagtattcgactgatgcggaatctacaaccgtaactaacgatgcatcgtctattactccgcgatctctgaactatgtgttcaataaccgtaaaggtacagaatcggtttggggttcttctaaaattgctaccactgcacaggcggttgctggtacagataacactgtaactatgactccgcttaaagtcaagcaagcgatcgcgtctctggttcctgttcagtcaagtgcgaccgaaagctcgcaaggtttggtacaactggcaacagttgcacaggttcaggctggtacgatccgtgaagggtatgcaatttcaccttatacgtttattcgtttaactgcaactgaaagcaacctgggcgttattcgcatcgcatcacaggcagaagcaaacgcaggtactgatgacaccaaagcgattactgcgaaaaaattaatcaatacccgtgcaactggatcccagttcggtgttgtcaaattagcaacaactgttggttatgtggcaaacactgcactttcttctaatgctaatgtattgcctagcgatcgtagtgcggtaattaatggttctctttatgagaatagcgcaatacataacaacaaatatcagacgtggacagatcttgattggcatttcccagtaggtgctattgtcatgactggtttccagactgaccacggtagtttgtatatttgtgatggacgttcactgaataaaaataattacccgttactgtttgagcgtataggttatacatttggtggtggcggtgattggtttaacattccagactgtcgaggcgttgcagtacgtggtcatgaccgtgggcgtggactaaaccctaatcgtgggtatggtacatatgaaggagatatgttgggatggcacgaacacccattacaacttatctaccagaacggcggtaacattccgaaatggcaagcagtttacgaactgaaaagcgccgagaagaatgaccaaagcgctcgcgtatttgatgcttctataactaaagctactggtgtgggcggtgaagaaacccgcatgaaaaacatcgcattaaactacgtaattcgcgtattataacagaggttattaaatgatcatcgacaaattaaacccgttgccgaagatcccgtttgttgatggcgtcccagatgacgccacgactcaaacgaagattatttggatcaaaaacggtgaaactctggacggttcgccagataaagtgtcaaacactggcagtcttaaccgaactggtgtaaacatccagcagaacgcggttcagttagaacaaaatactatcacccataatgataaaatcaacgaagtaatcgatcaggttaacttgattactgaaaacattgatgctattggtgatgaaagcgtaatcaaaaaagttaaccagttggatcaggatgttcaggcattaactttatcgaacacccaaacacagaacaaggtagcacagttaaccctttctgtaaatgctcagaacgatgaaattggtgaatacgatccagaaaaggatcctaaacaccgcacaattcgtaatgatatcatttacatcaagaaagaagttggttcatatcctggatttaacgttgatggtgatgttgacccctcttctactggtactggccttaaataccgcgtactgagtaaccaacgtgccatttctatgcaggaaacccgcataaccaaactggaagatgactgggcgctttccgaagtaggacaactgacagaagaggtaaaagaacttcgtgctgaaatgggtgattctggtcttgccacaacccgttcaatctatgcgcgaattaagatccttgaggatggttctgttgtaatgcaaaatgaacttgatgcgattaatagttatatcggtcgcacgtcaggttcaaccagttccattaacgatcgtgtgaacagtatggaaaactccgttagttctctggctacacaaatcaacgatccggtaactggtatcactgcacaaattacaaccatcaatggtcaaattggtacggtttctgttcagggtagtatccgttatgatattgcggaaaacaaacgcagattgatggatatggaaatgattctgggtgaatccggtgatgaaggattgcagggacaagttgcgatcttaactggcgacattggcgaagattcagatcctaccagtatcaaaggccgtttgagtgttgttgagggtgaattacgcaccaacactagcgcactatgggaactgcaaggcgttgtaggtaactcttctaatggcctcgttgcaactagccagcaggttaacaaagaaatatatggtgatggtgttagtgccgaccccgttactcgtgctggtttgaaaacgacaacccgcaacctgttcactcaggtaggagataactccgaaggtaacgaaacgggcatttatgcactaattgccgaccttaataaacgtgttgaggatttagaagcgttgaacattgcacaggcacttgcagatcgcgtaactatcgaagatctgaatgctaaactggctatgtatatcaaagaagctgacgccgatctccgttatgagagcaaaaacccgcctctgtcattcggtactaacctaactggtgatactgaatacactactggcgatccattgtctctaagcgtaactatgaatggtggtgtttctccgctgtcttaccagtggacgaaaaacggcgtaaacgttggtactgatgctaacacatttaccatcgattcgctacagccttctgattccggaacttacaaagtaacggtaactgatgcaagccataaagtcatcgtttctgatgaactggcgatcactgtcgcttaacgattaacaaggggcttcggccccttttgaggatctttatgattacgaacaacccagcacaattaaaagatgaaattctgcgccgtttaggtgctccgatcgtcaaaatcgaagtgacaaccgaacaggtttatgactgcattcaacgagcattagacctatatgcagaatatcattacaatggatctaacaaagggtatatcattctcaccctggggccggataacccgaaaaatattttcgatctgagtaaagaacacattttcgcaattactaaagtgttgcgtactaacatgggttcccttgtatcgatggatggtactgcggtttatccgtggtttactgatttcctgatgggccttactggtggttctctgggcggcggtggttgtgcatcacgtacctacggaatgaacgcatatggcgcggatatgggctattttacccagatgatgagctatcagcggtcaatgcaagatctcctgtctccgcttccggattactggtataacgacgacacaggacagtttgcagtatacggaaccgttaaagatggtgatattgttgttatcgaagcaatgatcagatcctttgttgatgtacccagtatggtcggtaacgtcgctggatacgctacagcgggttctgatggtgaagataagccaactatagcagatatatacaataacccctacaaagccgtctcaggcggtgtgaaggctggtcaaggtgcaagcgttcatagttcatcctctgcgtataacaaccgttgggtgaaagattacgcaactgctcttgttaaagaggtaaacggtcaggtgctggctaagtttcagggtatgcaattgcctggtggtgttgctccggatggaacccgactgattcaggaagctatgcaagaaaaagaaaacctccgtcaagaacttctgttactgtctgatgcacttccagtgttgatgatgtaaggaggaaaaatgcaaaattgggatgaaagtctgtttgcacagttagaagatggttccggcgtcgatcggaacctaagacaagaagtaacaaacccgtatgttaactggtacaagtataaccctactcaacagttacatgattcactaacagccgaagcaattcaaatgaaatctccggatatgtattacgtccgtcgagaatttgttaatattgataaaattttgggcgaagaccgtgaatcgaagtttacaaaatcgtggaaaattgcagcatacatcgattcgtatgcaaactacgaaggacagagagacttttacagcaaatttggtatgatgtcaaacgatgaaatgacacttgtgatcaaccctcgtttatttgcacatcaaactgatggcgggatccctgttctgggggatttgatttatttccctatggataacagcctgtttgaaattacatggattgagtttgacccgttcttccagttcggcgatcgtcctcaacgtaaaatcaacctcgttaaatttatctatactggtgaagaattggatcctaaactgcaacgaaatgaagggattaatcttgctcccgatgctgatctggatctcgaacctattcgaaatcttgatggattggctgataccaatattgaacaatacgaagaagatcaagcctttgaagatgaaggcgatgaattcattgaatcgtttgatgttgtcaacgggcgcggatcaccgttcgcacagttcccataaatataaccaggggaaaccctatacatgtaagggtataggagaaatcttatacccgctttaacccatacaggaaaaataaaatgtttggattttggtataatagttcgttgcgaaattatattgtcttgatgggttgtcttttcaatcacgtgcaagttaaacgcattcgcggcgaacaagaaaaatttatcaaggttccgattacctacgcatcaaaagaaaaattcctggcatccatgaacaagctgaactatgcatacagtcaggaaaatgttgctaaaacggaaacaattttaccacgtatgaatctatccctcgtcgatttgcagtataacgcaattcgtaaaactgggatcgcggtaaaccaaaaaatgacgcagttacgcgcacctggaaaaacagtaacgcagtttaaccctgctccgtatcgtctcatgttcgaactgggagtgtatacccgttatgaagatgatgtgtttcagatcatagaacagatactgccatacttccagccgcatttcaactgtcgtattacagaattacataaaaacgacattaaaatagaccgagatattaaaatatctctgcaatctgtttcccctgataccacgtttgaaggtgatacaacgacacggcgacacattgaatggtctttaatgtttgaattacagggctacctgtatccgcctgttaacgagattaaaggcgagatcagaacagtatacacggatttcttttccaatatgaacccgttggacaaagacaattttgaatccgttgatgctcaggtggatccggttgatatgcctatacaggattacacgggagaagaatacgttcaaacgtatgctaatgatatcccaattcctagcggtgatcaacctcctaaaccgaggggccaataatggaagaatttagcgtaaaacaactacttgatcttgaaaatctccctggtgctgaaactggggaagaaatggtcgtgtatgaaaaactcgaactcgttgatgtcgagtcacacccagcagatcgaaaacctgatttagaggaagactatgcacttgcgcgtaaaaccgcgcattacatgaatcagatgatcatggatatggcacaaattgccttgcataacgctaaaaactctgaatctccgagacacgttgaagtttttacaaccctgatgaatcagttaaacaattctaaccagggattgatgaaaattcataaagaaatgcgagaaattaccgaagaaacaacaaaaccaggatctgaaaaaggtaatggcggcggtaatgaaatgaacatagagaatgcaactgtatttgttggttcccctacggaattaatgcagaaatacggtagtgcatacgaaccaaaagaaggcttcattaatggtgaagcggtagaggtaaaccctgatggaaatggaaccaacgatcgatccgagtaaggaatcagatcacccaatcggattaatgcatcccgattatctgaaaaagaaaattgatgaatttgggatggagtggacgcaaagcgaacacgataaaaaatggtatccgacaaagtttagcgattacctgaaaattaacggtatccagaaagttgatattcaagcaaaagacagttcaaactttgcgacgtataaaaacaaaggaaacaagaaaacccgatataacggaaacccaaacctgaaacgtgcgtacatccaaactaaatggacgcaacagatgttgatggagtgggttaagtgtcgtgacgatattgtttattttgctgaaacatattgcgcgatcacccacattgactatggtacaattaaggttcagttgcgtgactatcagcgcgaaatgctgatcgaaatgcataaaaaccgtatggttgcctgtaacctgtctcgccagttgggtaaaacaaccgttgttgctatcttccttgcacactttgtgtgtttcaacgaggataaatatgttggcgttttggctcataaagcctctatgtctgcggaagttctggatcgtacaaaacaggcgattgaacttctccccgatttcttgcaacctggtatcgttgaatggaacaaaggttctattgaacttgataacaaatgtaaaattggtgcgtttgcatcttctcccgatgcggtgcgtggtaactccttcgcaatgatctacattgacgaatgcgcgtttattccaaactttattgatgcgtggttagcgattcagccagtaatttcttctggtcgtaaatcgaaaatccttatcacaacgacacctaacgggcttaaccacttctatgatatctggaacgctgctatagaagggaaatccggcttcgtaccatacacggcgatctggacatcggttaaagagcgtttgtatacagacggtgatgatggcgtatttgatgacggctattcatggtcttcgaagatgatcgccagttcaagtaaagaagcatttttacaggaacattgtgctgaattcatgggaaccaacggaaccctgatcgctggctggaaattgtcaaaactctcatgggttgatactgatgaaacggaaactaatttttatcagtataaagctcctgtagagggacataaatatattgcggtactcgacccagccgaagggcgcggtcaggactatcacgcgatgcatattatagatattacatctatgccgtttgaacaggttgctgtatatcattcaaacaaaacatcgcaccttattttgcctgatgtcctgttacgttatcttatgatgtacaacgaagcatgggtttatatcgagctaaatagcacaggccactcagtggctaaatctttgttttctgagttggattacgataacgttatttgtgatagctataatgatttggggatgaaacagagtaaacgatcgaaagcgattggctgctccaccctaaaagacttgatagagaaagataaactcatcataaataacaaaaagacaatacttgaatttcgtactttctcagaaaaaggtgtttcgtgggctgcggaagaaggtttccatgacgatctcgttatggcgctggtttgctttgcatggctaacaacacaaatgaaattcgcagaattttgcgagaaagacgatttgcggttggcaaatgaggtattcgcacgtgagcgcgaactgctttatgaagatatgttatgtcctgttatcgtaacgagtggcgacgaaacaatatctgtcggccaacacggtatttcgtttatataaatttagaggaaacttaataatggctttaatctctccaggcattgaaactaaagaaacatcggtacaatctaccgttgttcgaaattcaactggtcgtgctgctattgttggtaaattttcatgggggccagcttaccagatccgtcagatttctaacgaagtcgaactggtaaactattttggctccccagacaatgacaccgctgattatttcatgaacgctgtaaactttttacagttcggtcaggatctgcgtgttgttcgtgtcgtcgataaagaagccgcaaaaaacgcaaccgcgatctataatcagatcaaaaccacgatcaccgctgctggttctaactatgcagtagacgatcagatcaaagttaaacacaataacgttgttattgaagaagatggtgttgttaccagcgttgatgatcagggtaaaatcctgtctgtgttcattccgagcactaagatcatcgcacatgctaaacaggttggtgtatatccggatctgtctagtggctggactacagaaatcgtttccagttcttctggtgtttctgctacgattacaatcgacggcgtagaagttgatccgggtattactctgctcaaccttgacaccgcaaaagaaactattcaggcaactgctttccaggaactttgcaccaaataccagctaccgtctgttattgcaatttatcctggcgaaatgggtagcaccgtaacggttgaaattctgtctaaagctgcatacgattcttcggctgtcattaagtcttatccttctggtaagtctggtaaaaacagcggtcgcagttcgatgaactttggccctcagaatgataaccaatacgcgtttatcgttcgccgtggtggtattatccaagaaacgtttatcgtgtcaaccgctaagggtgataaagatatctacggttcaacgatctacatggatgatttctttgcaaacggtggttcgcagtatctgtatggtacgtccctaaactggcctgtcggattctccggcgttctggaactgggcggcggtacttctgcaaactccactgtaggcgctgatgaactcatggctggttgggatatgttcgcagatcgtgaatctctgcatgttcctctgctgattgcgggtgcttgtgctggcgaaactgccgaaatttcgtctactgtacagaaacacgctgtgtctatcggtgaaacccgttcagattgcgttgtattcgtttctccgccgcgttctgctctggttaacatcccactggctcaggccgttgataacctcgtagaatggcgtacaggctacaaaatcggtaatactaccccagttgataacaacatgaacgtaagttcaagttatgcgttcatcgacggtaactataagttccagtatgataaatacaacgatgttaaccgttggatcccgctcgcgggtgatatggctggcctctgtgtttataccgatcaggtatcgcaaccgtggatgtctccggctggctacaaccgtggtcaactgcgtaactgcatcaaactggctatcgaaccgactaacgcgcatcgcgattctatgtaccaggtacagattaacgcggttactggtttctctggtggtgccggatacattctgtacggtgataaaaccgcaacgactgttccaagcccgtttgaccgtatcaacgttcgtcgcttgttcaacatgatcaagaaagacattggcgataacgcaaaatataaactgtttgagaataacgatgatttcactcgttcttccttccgtatggatgcaggacagtatatgtctaacgttcgcgctctgggcggtgtatacgattaccgtgtggtttgtgacactacgaacaacacgccggatgttattgaccgcaatgagtttattgcatcaatctacgtcaaaccagcacgttctatcaactacatcacactgaacttcgtagcaacctcaactggtgcggatttcgatgagttgattggatcaacgtcagtataacatgtaaggggctgaaaagcccctataaatacacatagaggttagaaaatgcttactgatattgtacgcgcctttgaatccggtgatttcgcacgtccgaacctgttcgaagtagagatcccgtacctgggcaaaaactttaaattaaaatgtaaagccgctactatgccagcgtctaccgttgaaaaagttccggtaggttacatgaaccgcaaaattaacgttgctggtgaccgtacctatgatgactggacaatcacggtatataacgacgatgcacacacaacccgtgatgcaatcgtagcatggtcaaacatgctgcatggtatgggtgaagacattacaggggatatccctgcaaactacaaaaaaaccgctacggttaaacagaaaaaccgtaacgacgaagtaaccgccgaacataccatttatggcctgttcccgaccaacgtgggagaggttactttagactgggatagcaacaacgaagtgagcacttttgagtgtactttcgcgctagactggtgggtttaaacgctataaatacaggggtagcaataccccttatcattatttttcggagttgtaaatgaacttttttggattagacaatgtgttagggtttttcaaaaatttcgccaaacaggatgaaatggaatttgaagcccaattaaaagatgatacaggttcgattgcgcctccgaaaaataacgatggggcgcacgaaatcgaaacggacttatcaaaccagcgttattcttctgtgttccaacagttctattccggacaggatccgcgaattcagaacaaaacacagctaataaatacataccgtggtatcatgacatatccggaagtggaaaacgctgtttctgaaatcattaacgaagcgattgttaatgaacaaggaaaagatattgttacgatggatcttactaaaacgaattttagtaaaaatatccaagataagatcatggaagaactcgataccgtaatgaatattcacgatttcgataaccgaggatctcgtttattccgtgattggtatgttgattcgcgtatctatttccataaaatcatgcacaaaaatgaagctgacggcatcaaagaattgcgccagttagatccccgttgcatggaactgatccgagaatcggttacagaaaccctacccggtggggttaaaattttccgtggctatcgtgaatacttcgtatataccgcaccgaaaaacggttatagctacaacggacagatttatagtcacaatgacaaggtaaaaattcctcgctctgcgattgtttacgctcatagcggccttgaagattgcgacaacaacattataggctacctgcaccgcgcggtcaagccagctaaccagttgcgtttgctggaagatgctatggtgatttaccgtattacccgtgcgcctgaacgtcgtgtgttctatatcgacgtaggtcagatgggtggccctaaagctacacagtacgtaaataacattgcacagggcttaaaaaaccgtgttgtatatgacgcgagcactggtaaagttaagaatcagcaaaataacctgtcaatgacagaggactattggctgatgcgtcgtgatggtaaagcagttaccgaagtttcaacgcttcctggtggcactgccttctctgatatcgacgatgttaagtggtttaaccgtaagctgtatgaagcgttacgtattccgttaagccgtatgcctcgcgatgatggcggtatccagttgggtaacgatggcggtattacccgcgacgaattgaactttagcaaatttattcgcgaattgcaaattcaattcaaccctgttcttgcggatccgttaaaaactaacttgatcgcgaagaaaatcattacagaagatgaatgggatgaaaacgtaagtaagattgcttttgtatatcagcaagattcttactattccgaaatcaaagatattgagattttggaacgccgtttaaacctgatgggccaacttgaaggggtggtcggcaaatatatctcccataaatacgtaatgaaagaagttctccggatgtctgatgaggaaattcaaagcgaagccaaacagatagaagaagaatcaaaagaagaacgttttaaaaatccagaagcggaagaggaaaacttttgatgaaagaatttatcgaagcaatcaaaagcggtaatctggtggaagctaaaaaaactttttactccatcatggaagaccgcacagaagcgcttcgtcacgaattgcgcgttgaacttgccgaagctgtacgcatcgaaggcgaagaagacaaagaaaaagacgacgaaggcgctgataaagatgacgaaaagggcgataaaaagccagccgaggatgataaatccgataaagatgatgagtgaggtgtgtaatgcaacttgacatcgaaatcaccgccgaagatctccatgaacatttagacgaagcgaaagctcgtgtagatattctgggtatcgatgaaggcacggttaaaatcatcgaaaatttggcggtcaccgaaccaaatttagcccttgctatgatggcggttgttgaaggtttaacacttgatgaggtaattgtcaagcatgttgattcccgtggcaacgtagaacgcctcaaagacaggaaaacccgtgagcgtaatgcgtatcagacgaccggattaactaaatcccaacgtcgccagatcgcgcgtcgtgctctcaaaacaaaacgtgctaacccgtcaattgctactcgcgcacaacgtaagcgcaagaaagcattgcgtaaacgtgctgcactggggctataaatatgaatgaatcccaaatcaacgaaaacggcgatatgcttttaatcgaagaatggggtttaccttgcggtgacgtttcagaatctattttagaatctgttggggaatcaaaagacggtaaattacggatcgaaggtattttccttcaagccgaaaaggttaaccgtaaccgtcgtttgtatcctaaaaacgtacttgaagaagcagttaacgattatattagaactcaagttaacacccgtcaagcattaggtgaaatgaatcaccctccgcgtccgaatgtggatccgcgaaatgcttgcatcctgattgaaaaattgtggtggaagggtaacgatgtttggggccgcgctgttgttgttgaaggcgacggtggtgatggtgacaaactggcggcgttgattcgtgctggttgggttcctggtgtttcttcccgtggattaggtaagctctccgattccggcaaaggctacggcgttgtacaaaagggctttaaattagctgtaggcgttgatgtcgtctgggggccaagcgcacctgatgcatatgttaagcctatagtggaaaatcagcaaagcaaaccgcttgttgagaataatagtgctgatgacgcttttcgggaattgtccgagcgtttgaaaggtctataaatacattaaacaaaacaacaggaaaatcaaaaatgcttaaagaacaactgctggcggaagcccagaacctggatactccggtcgagttagacagcattttcgaatcagttgaactttctgatgacgtgaaagcgacattcaccactgtattcgaacaagctgtaaaagctggcgctgcaaaactcgctgaatcccacattacccagatcgcggaacgttccgacgaactggtcgaagctcaggtaactgaacgtgccgctgaaatcgaaactaagctgtacgaagatgctgataaatattttgcgcacatttccgaagaatggctgaaagaaaacaaagaagccgtttcccgtgacatcaaagccgatctgtttgaatccctgatcatgggcctcaaagaagttctggttgaacataacgttgtcattccggaagaacaggttgatgtagtcgccgaactggaagacgaactgactgagaatcagcaggaagttaaaaccctgtttgaagcgaatcaggaactgaccaaagaaatttcagaaatgaaacgcaatgcagtagtttcagagaaaactaaaggtttgaccgaatctcaggtcgaaaaagtagaatctctgattgaagggctggaatattccgcaaccttcgaaaataaactcagcgcaattgttgaaatggtagcaaccaaagctgaaaaacccgttgacgagtctgtaaatactccgcaaacgaaagatgactttgttccggtagtcgaaagtgttccggcagagaaatccaagatcaataaatatgtacaagcggcaaaagccctttcttaatttcaaaaggtaagaaacaatgtctaagaaaaacgaattgatggaaaaatggaacgatcttctggagtctcaggaaggcttaccggatatcgctaccaaatccaaaaaacaactgattgctgccattatggaagcacaggaaaaagacgcagaagttgatccggtttaccgcgacgagaaaatcgttgaatccttcggtggtttcctggcggaagctgaaattgctggtgaccacggttacgacgcaaccaaaatcgcttctggtaactcaagcggtgctatcaccaacatcggccctgctgtaatcggtatggttcgccgtgcgattcctaacctgatcgcgttcgatatctgcggtgttcagcctatgactggccctactggtcaggtgttcgctctccgcgcagtgtacggcaaagatccgctggcttccggtgctaaagaagcattccatccgatgttctctccggatagcatgtactccggtcagggcgcggctccgagcaacggctttaccgaactggcttccggtactgcgatcgctgacggtgctatcgtgttccacgatttcggtgaaactggtcgtgtgttcctccagaacgtttctggctctccggttactgtaactggttctaccgatgatgctctggatgctgctgttatcgccgaacaggaaaaaggtactctggctgaaatttcttacggtatggctaccagtgtagcagaactgcaagaacagttcaacggttctactggcaacccgtggaacgaaatgggcttccgtatcgataagcaggttatcgaagcacgtagccgccaactgaaagcacagtactctgtagaactggctcaggatctccgcgctgttcacggtatggacgctgacgccgaactgtctgctattctggcaaccgaaatcatgctggaaatcaaccgcgaaatcgttgacatgatcaactataccgcacaggttggtaaaactggtttcactcagaccgttggctctaaagctggtgcgtttgacttccaggatccgattgatgttcgtggcgctcgttgggctggtgaaagctacaaagctctgctgattcagatcgacaaagaagcaaacgaaatcgcacgtcaaactggtcgtggtgctggtaacttcatcatcgcttcccgtaacgtggtttccgctctggctcgtatcgatagcggtatcactccggcaggtcaaggtctccagaagactctgaacgttgacaccactaaagcagtattcgctggtgttctgggtggcgtgtataaagtatacatcgaccagtatgcacgtggtgattacttcaccgtgggttacaaaggcgataacgaaatggatgctggtatctactacgctccgtatgttgcgctcaccccgctgcgtggttctgatccgaagaacttccagccagtaatgggcttcaaaactcgttacggtgtaggtatcaacccgtttgcgaactctcgctctcaggctccgtccgaccgtatcacttctggtatgattaccaaagaaatgttcggtaaaaacgcatacttccgcaaggtttatgtgaaaggcttataagttattgaaaaataacgatattaaagggaaccttcgggttccctttttcatttctataaatagtgaaaacaattgaggctatattatgaaacatattatctacaaaataacaaatttggttaataataaaatttatgttggtgctcattcaacagaagacatcaatgattcatacatgggttcaggggtggctataaaggcggctcagaggaagtatggtatcgataaatttataaaagaaatattacatattttcgatacccgtgaagaaatgtatgaaaaagaaagagagattgttaatctagaatttgttaataatccacatacatataatatgggtatcggtggtgatggtggccctatgttgggtatgtttcattcagaagagaagaaacaagaaatttccaagattactaaagagagaatgacagatgaagtaaaatctcgtctctctaaacttaaaaagggtaaaccacagtccgaagaatccaacaggaagcgctcagagacgttaaaagctaaatatatgaatggacgtatagacagagagtataaacctctcacagaagcacacaaggcgaaattaggccgttctgtatcgatagatggagttgtatactcatccggatcggaggcggcaaaatcccttagtatgtcccactctggtttaaaatatcggattaatagcgacaaataccctacctggaaatttgttgcataaataccattatacactttacgcaggaacataaaatgagtgaaaaattttacacaattaacaagctggtgcgtcagtcacagctaccgcctggcctgtctaaaaaggttcttgatgaggcaaccggaacagaaacaattaacgtagctaatacccgtccagatctggtatctcttacccgtgcggtaaacaacctgatctacggtgaacttgtagcgattcaggaaactaatttgcctaccgcaaccctgttcggtgtgcgttatcgtaaccctaaaggcaatatgacgttttccagcgctgctacctattccggtaagtatgcaagccgtgatactattccagatggtgcggttggtactgcctataccaaaggccaagtttttaaacacccgacaagcgatgtcgtatacgaagcaactgatagcgtaactctcgcaggtgctgatattgatgaagcaattatggtcgcagtattcagcaataaattacgcctggcaagcgaagccgcgccaacaagtcagtatgaaaccagcgaagatattagcacaacttcttttgaaatggatcgttggaatatcaacgttcgttcccgtaaattcaaaactgaaatgaccgtggaacttatgcaggatctggaagcaaaccaattcaacgcagaaaatgtgattgaagatgttctgggtactgttgccagcgaagaagtaaacaaagatatcatccagactctgatcaacgtatcacatcgttacaacgttgatggtgtggtaacaaatggcattttcgatgctacaaccgcatacactgcaaaggatgctccggctttaggtcgtttcctgtatcaattagtgtgtgaaatggggcaggaaatgaatagaacgacttcatttgaagctacctatgtcctggcctcttctcgcgttgtaagcgttctgtctgcgtctggttggatgcatgaaactgatgaaacccacccgttagcaacaggtcgacttaaaaacggttactatgtctatactgacaccaatacaccgtttgattacctgctgactggttgcaagtacgatctgggtgaaatggatcatgttggctctctgttctatacgccatacacagaagctgatcaggcaggttcgatcaagatttctgttgatcctcaatccttacagcctaaagttgctattctgatgcgctacggtttatcggttaacccgtataccactgctgctaatgaaagacttgtgaaaggtgatgactgggtaaacctctcaggcaaatctaaaatgagtcagattgttggtatcaaacttcctaaactgggttgatagtataacccaacggggataatattcaataggtggagtagggaaacttactccatcttttaataattattataattaatattaaattagatcttgaatttataaatgatttatgataaaatttattaattataattattatagatcaaataatttttgaaatcaagtaaaaataaatttgattttataaattagatcatgtataattattcttttaataatatattatattagatcaatttaaatttgactactaattaatatagtatattatagatcaactgggtaaattggtgagtatgttatgagtttgaaattagaagatctgcaaaatgaacttgagaaggatatgctgatagatcccctcaagttgcaatcagaatcagcggatatcccgaagatttgggctaaatggcttcgataccattcaaacgctaagaaaaaattgatccaacttcatgctaaaaaagaagctgatgtgaaggatcgtatgttgtactacaccggaagacatgacaaagaaatgtgcgaagtggtgtatactgggactactgaaatcaaaatcgcgatcgctggggatccgaagattgtagaaaccaacaagctgatccagtattatgacatggtggtagatttcaccagcaaagcactggatatcgtcaaaaacaaaggatactctatcaaaaacatgttagagatccgtaaattagaaagtggtgcataatgtctactgaaaatgaaaaatgtgtagtgtgcaagtgtccggttccttctactggttttgtgactgaatccgggcgcgtgtgtagtaatatctgtgctgactacatcgcagaaaaaacaaaaaacggcgagatcaacgaatccgatgatctgaatgaagttcaaatgttgctgtaggagaatcttatgattggttacggtgaaggaattacagatcgtgatgaacgtccagatctcttagaatctgacgaacaccctgatttttagtgcataaatactagcgtacccgaaaggggcttgataaaagaatgctggatgataggcgtactcttttgcgccgtccgatggagtttaccttcggcggggtgattgataacataccttcgatcaagggcatgagtaaaaaaagccagaatagtacctcactggctataatcaaatgtacgtgttgggctgattgcgtcccaaaattaaaaagccccttcctttcggttggggcttcttttttagaacttttcttcttctccgctttctagttcggcctttaattcttcggctcgacctttcagcgcatcgcgcatagaaatatcgtctgacggcgcaacatcaacttcttttacacgatttttgtaatatttttcaagctctttaaggccgtccatagtacggcaagaggcgaccttgctcatgaaatcatcaatagccgcctcataaagtcgaaaatcgttgaaactcttcattttgacctctaaatttcgatttgtttgatcacgtagtcaaacttttcttcattgtaaatgcgtactcgttcgattgcgtgtttcataccatagtttttgtatgaatatttatttttagcatttttggactttgccagcgttgctaagttatcaaccaaatcccaaacagtagcaagagatttagaatcatgtttacgcagtacgcgcccaattgactgtttgactataacagcagatttgcacggatgcccgaagatgatgtgatgaaggttcttaacagaaatacctgtactcagtacgccaatagaaccgattacgatcagccccttcgttgactccgcgatccgtttcatttcgtttcgctcatcaatccccgtttccccagaaatgtatacaacgttgtcatatacctttttgagttgctcatacagccatttaccatgtttgatctgattgaacatcacaaacacgttttcatctttttcccttgccagtttcaacgccagcttacagatccatgcgttacgcctggtatgcgatgttatatacttgatttcgctttggtaatcggcccccttcattttcttaatctcatcctctttgtatctcatgaagatggtattaattcgaaggttggtaacttgaccttcctgcatcaaccgatttgtatcaactggcttgaagatttgaccaaaagcgccaatgtattgcatcatgtttgctttgccttctttcagagaaccagaaaggccaaacttgaaaatacactgatccattgtgttgatgatcttctgtatgctttgtcctgttgatttgtggcattcatccaccatcaaacacatgaactgttgaaaccactcaggaggcattttaacagccgattgccacgtagacacgtagatcaatgcattactgtttttagcagttcctgaacgtattccaagcattgcctcgcgaggtaaaaggcgatagttgacaatatcaccgatcatctgatcaacaagggcggttgttgggacaatgattagtactttgcctgtgtaattttccagacaccaacgagatatcaacccctggataagagatttacccgctgacgttgggaggttaagcacagcacggcggtttttaatcgcatggaacaccgattgtttttgataccaatacggatcaatctgcttgtttccgtcgtatactgggtgttcttctaaccacttgtcaaaatctggctgggtaatttcttctgtttcgtggatcttaggatccatccagatagaatacccgcgagactccgcgaattttgttacaagataggctaaaccgtagggcagtttcccgttatagtccatcaagtatatgtagccgttccatccaccatatttgtattttgcctggtactgataacctggcggctggaagctgaaatagtcgcgcaattcatagactatgttagcctctgcctgaatctgcacatgactagtgttaaggaatttgacttcgatatccactatgtgtatcctatatacggtttatatgaatatttataggctaaataatgataaacattggagaactacaatgagtattgattacgaaaaggttgaaggtttcaaagccttagaacaaaaagaagccaaattacagcttgctacctacgcgcaagaaacgtttgatgtcaaactgaaccgtcagaagtcattcgaaaatatgcttgctgatctggaagctgccttaccagcagaaaaaccagaactgttgatcgactcccctgatccggaaattgttacatacgaaggtgaacaatccgttcctgatgttgttattgatgtgactaacgatttcatggattacgttaaagaggttgctccggaaatcgcagaccagattgaaattgttcctgacgctctacaagctcctgtaagcgattctgagacgttttctgatgaactggcatggatggaagggtttaccccgtctatcatcatgatgggccgctctgtttcgaatactggcttttatacgtgtccgtattggatctatgattggatgaaacaaaatccggattggtacaagcaccctgacagttgtcctcattattcagcgcgtcaaaccctcaagtcgctggcatggtacatgcatcgtgatgggatggttactgtacgggaaaccagaaacagccagttcgacacgttcaaaaaataattttaaaaagtagttgaccttaccctgctgttcgagtatatttgtattcgaaggcgggggaatggctctcgcagtgaagaaggaaatacaaaatgaacatgatgaaaaatgcttactacccagttctgtttgtttggactaatggtgaagttaagaaaatcgtcaattctaaagctccttattacactgttggtgaagcacttcgccacgctgcggaagcgaattatcctgttcatgccgaaccaggttatgctcgttggaacggttctaaatgggttgctgatacctgggacaactacgaagaagaaagaatggagtgtgatcctgattacgtatctcgtcaaatggaagctcatatgattgcagatcgtagactggataatgaagctcgcggattttattgattaacaaggggctacggccccttttcttttaggtgaaatatgaacttaaatcacgaatgtttaaaagatttgagcgatggtaacgagattggtaacgttatttttcttgatatcgatggcgttctaaataatatgcggtgcatgaaatttggtgaacatatggacatcgaatgcgcacgacacttacgccggatagtgaatcacgctaattgtgatatcgtcatttcctctacgtggagaatcggcaacagtacccataatctacgtgaaatattttatccgtggggattgtatcggatcattggtaaaacttgcactaacttccctcatagtactggaatgcgtggtgatgaaatcaaggcatggatcgatactttcggatgtaaaaactatctcattcttgatgatgataccgatatgctttcttcacaaaaagaacattttattaaaactgatgggtttgttgggttgaccgaagaacaatccacttatgcgatccgtaacattttcggggttactactccgttttgtcctgaatgcaatgggtatggacgtgttaacggctacgacaaatgcggaacgtgtaacggtaaaatactccggctataaataccaataaacataagaggttaaatttatggcaattccttctgtaacaattagcgccaacaaaaacgaacttttgattggcgaaactttgaccttagaggttgaaactactgaactagatccgggtgatgtgtttctggcctatcgttggcaaaaagatggtgtagatattccaggcgcaaccgccgatacttacacaactacggttgacggtacaactgctggcgattataccctgatcttaaaacacggtgctgatgaagaatcagcaacagaaaccacgtctgatacaatcaccgtgaccacttatccggtaatcgcatttggtactgatttacctgcaacaaaatctgttgttactggtaaagaacttaccctgactgttgcggtaactggcggtaaatccccgtatacctatgtatggaaacgtggttctactgttgttagtggtgattctgcaaccttaacaattagcgcggctgcaagtggtgatgttggttcatatacggtagaagtgacggattcactgggtaacagaaaaacttctggtgcttgtgctgttagcgttacacctgctcttgcgtttgataaaaatctaagcccgaccgcttccgtaacacaggattctgcattgatccttagtgtaactgtattgggtggtacttctccttattcttatgcatggactaaggatgattctccggttggagacgatgcggatactcttacagtggcaagtgcggctctggatgatgcaggttcgtataaagttgtagtcactgatgcgaattcagataccatcacatcaactgtatgtgtcgtaactgttaatcaaaattatgatgatctcgtttctaaatggacggttcacccgattccgtggcgtgataccagctttaccccgatcggttattgggtacttgatgaaattctgtatcaaaaagcacagggtaaagattggaaaactgattatgctgattacaagtatagtgaggaagtacaaacgatcctgaaagcgttcatggaaaacggtgaatgtgagatccaggattcacgaaacggctatattcataaaatgagtgaaatctaagaggctttaaatggcaactgaaaaatggactacggttcatcctattccgtggagaaataccagttttacatatcttccatactggctatacgatattatcgttgatgcttttgagaaaggcgacgactggcgcgattatgcggaagaaaaatataaattagagtttgatactctgaaagaggcgtttgaagattatggtgatattcatgtaatcgaatctcgtaatggtaaactggttagtctgttgtcattgactcctgctcctgaaccagatcctgaccaataaaataaggcaaacaatgaatacacttctttttgatttcgacgacactttagcagaattttctcaggctttttatgataagttcggtgtacgtccggaaggaacgccaaaagaacgatatgacgaaatggcggcttctttggtgcgtactgatttttataaaaaccttccccgtattcaggctgggattgacctccttcaatggagtttccaacgccgaatcggtgatcctgctactttgctgcttcgcgcggaagcggtcagccctctttgggttatgaaagaaaaactgaactatacagataagatttgcgctgaactgggggtctctcgtctcgattttagtcgcattgactatccggaacagttcgcagaacatgcctatcgtggtgttctgatttcccgcaaccagaaacatcttgaaatctggaacaattctcatctagctaataaagttcctggtattttccttgcggaaaccctggaagaaaatattcagctagtcacggaagcgcttgcaaaggctaatcaataacaaaaaagggaaccgcaatggttccctttcttttacaatctttttaattcatcaagcgctgttttcttatcaccaacaaagaggattgctttacctcctgcttttctgaaaggcaacaccgcttttgcccgatcgtcaaacaggattcctttaccagcgaatgctgctttttcatggctacttttaacgtagtggaattccggaacgtaacccaatactttttgtaatgctttacgtttttgttcggcaacaccgtcagaattgaatttaccgacactggttagtattgctacatcaccaagtgttcttaaatgatggaataattcaaatccttctttgattggttccagattttcgtagaaatcagttttggcaatttttgctttgcactttttcaactcatcttctgtcatcatcgagggttcgccatacattggcacaaatgaaccttcccagtcgaacaatacaccatccatatcaaagaaaaacttattcatatcaattcctcagtttgtgtatgcatactataatgtttaatcattaatgtcaaccccaagtgtcagttttcggtgcgtatgctgcaactttagccacaatttccttatccagttcagctacagatttctgaggcttaccacgggctttaactttgatgtagtttgacttaacaacaaacatccctttgttacctgatttcttgatctcgctatcaacaccaactttgttaaagctgatccaaatgtcgccgtccatatactgtttaagagaatcacccatgttcaggatcttcgccatagtaagggccgcgccttcgtgggtatccatgagaatttctttaggaactacacgatcgcgtttctggttctgctgcatagcaatatgcacatcgttcataacccatacgatatgtacgttttcttttttgtatcccagcgtttcgacatcacgcgcgatgcttgccagcttgctcatgccttttaacgttacgtcaaagatgaggttaggtttacgatcttctggtgctgccataataccggaataaacacggttttggtttttgttggaaatgttgaaaacgtcggcgatcacatgatggagggtagatacgttttctgggtttttgaggttcattgttttgacatcatgacccgtttgtttcttgatctctgctgcgagtttatcgctacccattacaagttttttcagggcgtcaacgtccagggtaataccttcgatgcctagcagtttttccagtgtgaatcctttaccggaaccagcaccgccagcaagaataacaacctgaccgaacttaggataagcacggcctccgaaggtgatcagcgcttcggttaaggtgctttctgtgaattgtttaaatgacttcatgtaaaattctccagtttattttctattatttattgacatgatttctgacagtggtgtatggttatggtgttcgacggataggccggaagaactttaaaccataaggtatacgatatgaaaatcaatttacatcgcttcattgcagaattttcccgcgaccgcgacatggactcttacaactattactcccgtgaaattgaagatcgttttgcggctcatgttgggttccgtcgccaccatactcctaaaatgcgccctgaccacgatccgaagtatagccctatcacatggcaagccccgatcaatggttacgttgaagggatccggatcatgacttttaacgcgatgtatggaaacgctttgatccatattgcgcgtgagaaaaaggcagaattccctaacggctggcgtattgatgaagtgattcaaacccttatgcagttacgacgtgaatacaaagctggtatgtgtctgcgtaatgaacagtatccgatgtataaaacgtatgcctatatctctaagcatctaattaattccatgttttacatcgttggtaatcatggttccgctatagatatcggttcttatgaaatcgtggcttatgctcgcgaacaaggaaaggccgctgcactgaaaatcattgaatctggtgctatcattcttaaccatcgcattgatactattgcttactatggcgatcaggttgaggttgaaggcgtacaccatgaacgattcaacaaagccgtatttgctaaaaatggttatgcttatggtaatgacattataacttctgctattcctttcgttcgtctaactgttgaaggatttggagaaaggttgccttataaactgtcagaagctcaaatgtgtgcggctgctgaaagaatcgccaaaaagcggaaaatgtataccgatgaatacctggcgtatgtcaacaaaacaaaagaagatgtagatcgagaaatttcttgcatggatttgtgcctttgatataatgtaagcatcttttaaagggaggatgcatgaaaacgatacattgcagaaatgaaaacgttgtttactatcacggttcgtgtactgctgctggtattgaaagcatgttattgcctccctgtgattctgatactctgtctgaaaaagacaggaagaaaaatttagaccgtgttttctttaccgctgatatcgggttagctcgtatatacgctggaagggccgcgcgttctataggtggggatcctgttctgtacagggttgtgtgtccggttgatgttgtatgcatgaacgaagacaaaggcgcgagcgtttaccatgcagcatgggcgttttgtgaggaattatgaatgataaagtgttggcgtatctcgttttcttgctgggatatcgcttagaagtgatgggcgcgtattcatcaatgtatggtgatttaacggctatctggatggttgggttaggggttgcttttacattcctttcctttgcaattgttaatgaatcggaaaaggatattgtatgaaactatatcatgtgatctactctggtgttttaggcattgacaaacaaatgttagttgatgtaatgtgtaaaaaactcgatgagcgaattggaacccgatacaaaaatcatgtatcggaaagtatcttcatcaacgttgaccatccaaatgacatggaagaaatggttaatactcttgatgatcagcagatcccgtttgttgacaatttcaacatgagcgctggagtgtatacggtagtaacttttgttctaaaaaatgttgacagccgaaacgatagcgtgttgaatgtagttgcaaaaatcgattctaccaaaggaaaataatatgaaaattgtacaccgtagcatttccgaactgtctcaagctgaaaaagtgcaaattcatttcaaattcaatgatttgcgtaaaggttatgccgaaattgcccgtgaacatgggttagataacggcgatatttaccaggtagtacaggaaattgaacgtatccgcgcgttccgttctgcaaatctccctgttaaaaatgcaatgcgccgcgaagcgatcgaaatccatcgtaagcgtgtgtacaatttagaacgtgctaaacgtccgatgaagaaagaaaagaaacctcgcccgtttaaacgcgaacatcttaacacctctatggcgctggcgtttcaagatgcggggattatctaatgcgtaaatctgcgatggatcgttgggctagtattgctacttcaaacgtaaaaccaaaccaagccgcacctgatgtagaagcggttcgtaaagcaaaagaacctgagattgtggcccttagccccgaactcattgagcatcgccgccgtgcgtctgctattgaactggatctgcgtattgcgcgttcatataatctcaagcatgaacacgccgcaaagaacaaccattcttttgaccttactctggaagattggaaagtattgatgacaactgaacgttgtcagtattccggcaagatgtttagcaataaaccaggtagcccgtatgcccgtacaatggaacgtattaatccacgtctgggatatacacaagaaaatacaatagcggttatcaatgccgctaatgcagaaaaatcacagcttgatgcattcgttaagggtgatgtcattctggatgaagtaaaagtgaagttgctgcgtaaagcactttatcaagtcgaaaaacgtgtgaaaatgaaaggttaaattatgtttaagaaatattcttctctgactaaccattatgaaggtaagttcatcaatggtgtaattatgaacgggcttactggcggtgtgtgggttgcgcgtgaaaagatccacggtgctaactttagttttatcaccgatgacggcgttaccgttacccccgcaaagcgtactgatgttgtgaagccagccgaagatttttatggctgttcagcagtagttgcaaagtattcaccagggatccgtaagatgtgggaaaccctcaaaaagaccggaacgtatgatgatttggttattcaagtctacggtgaatttgcggggcgcggtgtacagaaagatgttgattacggcgaaaaagatttctacgtattcgatatccgtgtaaatggtgaattccttccggataacctgtgctcgctgatctctcgatctcatggcctgaaaatggccccgctgttgggatacggtacttttgaagagatcaaagaactgccgatcacgtttgaatctgttgtgaataaagcaaatagcggcattggtagcgataacacagtatatggcgaattcgtatatcctatcatggacgttgaagagggcaacattgcagaaggttttgtaatgaaacctgtttcacctgcttttatgccaaacggtgaacgcgttgcaatcaaatgcaaaacaaccaaattcactgagaagaaagcgaagaaagcaacccgctttaatgctccgatttcattgtcagaaaaagacaaaaaccaactcgatgagtttgtttgttaccttacagagaaccgtgtgaaaaacgttctttcgaaactggatctggcttcgatcactgcgaaagatttcggtcgcattatgggcttaactgttcaggatgctatcgaagaaatcagccgtaatcatgggcctttcctcgaacagttcgaagacccagcaatggctaaaaagctgtttgtaaccgaagcccaaaacatgattcgccctgtatggggcaaaatcctgaatcatgaattttaatcagattctggttgatgcaaaagcggctaccctgattggtagccgtaaacctcctgaacgtatcgcaaacattgctgttaaaatcggacgtgctttgaacgaacgcgggatcagggcttattctggcggcgctcctggtatggatagtcactttctgtttgactatagtccggataacaggtgtataatccttcctgagaacgggtttaacggccttttttcaaacggaaaggatatcatcgactttcaagatttaaacacacagaaagccgctgacgaagccagaaaggtagcaggtaacttcgatacacagaatgaatacgttcaaagaaggtatgcacgaaacacgattcaagttcttcgtgaaaatcttgacaatccaactgattttgttttattttgggcggaagaacgtgaaggatgtgttaaaggtggaaccgcgatcgctgtaagattggctaggttgtacagggttccatgtttcaatctcttcaaagaaagtgtattgaacgatgtgtgtgatacgttagggatcaatatcaaacccccaacgttggattttttatggtaattgaacatgcgcccttacttcgtgaaacatacgaaagatgggctgttaataacgcaataggtgaaaatatgattcatgtacgtagtatcggtactgacggcgaaactccggtagaaggccgatcacccactctcgcagaacgagcaagagaaattatcaacgatcagaatactaagatgatcgaacatgcgcgggatacaatcacaaaaggtgttctgaaacacgcgacaaaacaaaaccttatctatgatatgaagcacgatatcggctcttgtctgggtattgaatgtactcgctatgcattccaacgagtttctgaatggttggaagaagaagggctaaaattcgatacagaagaaaaacgcaacgccgctaagatcacaaattctctggctagtaagtacaatcaaacgtatcgaaaccatgaagaacgcgaagtgttcggtttcaacattcctgaaaggaaaacagatcgccgtgtaagtgaattcactttttacattagttggtaaaaaggtgttgacgggggttggttatagtagtattctaactcccgtagacaagacactaactcagaaggataaacatcatggaaatcgtaatgaaagcaacttatgctggatactgcctggaagtaaaaggtgttgctaacaacggcaaaggcttacgggccaatgttgaagcaatgctggatgaattacatgcaatgtacgaatacgacaacgtagcgggtagcgttcttatccaggcgttggaagttgatggtgttgattgtgctggttggtgggatgcttacattgactacaacgataaccgggtttacctgttgagcaacaaagattatttctaaggaaccactatgagcgatgaagctgaggatttagaagattgggctgattttgatgacgaagaagacggtgaatatttctgcgttaatcgtggtgcttataaagaccgtttagaactccgtaaacttttatcgggttcctctcaaatatcaggatccaaacgaaaaagtagtaaacaaaaagttcagtatagtgatggttctgtacgtgatgaaactgttgttgctgaattccgtggtcgggttatcacaaaagaaagacaaattgatgtaaagaacttgtatgaagtggctaaggctgctaaaataggttctgtgattgtttgccctgtgtgcaaagaaaaacacacaaagacaacgtatcacaaagttttctgttcgaatggcagaaaaaccagtaaggattgtaagtctaaatatcacaatacaatccatcccgaacgactggatcgggtattttaaaataaacctaaaacgtggagtacgtttatgaacaacaaaactttcgaagaactgaacagcatcatcacttccgtagattcctataaggtttctcactggtcgcaatatccaactggctccgaagaggcgctgttttatattgaatctcgtggtggtaaatttgatcaagtagttacggctggctgtaaccgccttgcgcaaatcctatcacgtccggtgactatggaaaacgtagattttgctaatcggttgtacaaaatgcactttgggcgcgaaatcttcaactacaaaggttggaaagaaattgcagaactgggttacatccctcttgaattcagagcgattccggaaggaaccccagtagcggttaaaaatccggttgcaactttccatgctgggaaaaatgcgctgtggttagcaggacacgtagaaaccctggcgatcaggggagtatggttcccttcaaccgtagcaactctatcccgcgaatgtaaaaaagtgttgaagaaatatctcaagaaaacctcagatctcgaaggtgaagcatttgatatggtattacgtacccgtttgcatgacttcggcgcacgtggaacctcttctgctgaatctgctggtattggtggccttgctcatctgtataacttcctcggtactgataccgtagaagcgctgattatggctatctctctgtttgaagattgtcagaaagcgtttgatgatggtgaaatggcggctggtatttcaattcctgctcgcgaacattccactaccgtttcttacggcaaagaaaacgaagaccttgcatacaaaaacagtattgagatcttcggtgaagggatgtatgcatgtgtgtatgattcctgggattttaaagcggcggttcgccgtatcgcagaatataaagattctattctttctaagggcggtactctggtagttcgtccggattctggcgatatggtagacaatatcatgtacgctcttgaagaactgggccgtatctttggctatacagtgaactcaaaagggtataaagtactacacccagcagtaaggatcattcaaggcgatgaaattcatggccctgaaacaatcaatcgggtgttgaactggatggagtctaaccgttgggcgtctgaaaacatcgcgtttggtatgggcggcggattgcttcaagaagttacccgcgacactcaaaaatatgcgatgaaaatgtgcgcaatcaaaattaacggtgtgtggactggtgtgtataaatgtccaaaaggcgctgaatggaaaaagagtaaaaaagggttgttgatgactatcactgatggtgttaactttaaaaccattgatactctggaacagaaagtgccggaaggctggaaagatgctatgatcacatactatgtcaacggaaagattactgcccgtgacactttagaggaaattaggaaccgtgccgggatttagtatccgcaaaaacgacaaaggaaccgtgattttctatgacaacatgccccttgtagctcgcaaggggctttttgctaaaatcgctgggtattcctttaaactggaagaagtcaacgacgaaacactaaaagagatcgtaagaattgccttacaattaagaggtaagaaagacgaacaaagagctattgacatgatcaataaattgggtgaaactcaatgcttcatagtgaatcgtggttacaagtacgataccattgcaaaatttgaaaaagggctttgtgaattatgagttattatggtgtgatcccatacacaggaaacaagcaaaagctacttcctgaactgttcaaattatttccagacagaaacagctatatgcgattcatcgactgtttttgtggtggtttgagtgtgtccctaaacgtccctaaacccgttctaagcaacgattacgatcggacgttgattgatatgtataagcgccttcaaatgcttcctgacctctctccggtgcgagaattgattaaacagtatggtctgggtaagaacgagaaagaagcgtatctcacatttcgtgatgcatataataagaacaaggatccgctatggctctatgttctgatcctgcattcgtttagtaatgttaatcgaaccaacgataaaggcgattttaacgccaattttggttgtagaacgttgaatgattctaccgttaaacggtttgaacacttcaaaaataatgttcggggaattgaattctctagcgcatcgtttaaggatcttgatatctgcttaaatgattttgtgtactgcgatccgccgtacctgatcactgatgcagtttataacaagttctggaacgaagaacgcgagcatgaattatatgattttctcgataatttaaactctgatggtatcaagtttggtttatcaaacgttacacatcatgcaggaaagcaaaatgatatcctgatcgagtggatgcaaaaatataatgtgcataacctcgataaaaagtatctgttaggccagcatactgattcttacgaacaaaataaaacgcaagaagtctacgtgtgcaactatcagaaacgcgacgtaaatacataccctgaaacactggatgacttaatgtaaggtaacatatgtttaagatttttggttatatcccttctgtttacaattgcgctccatgcctgaattctaaacgtctcctggacgcaaaacgaaaagaatatgagtttgtttctgtagccgatgaaaaagacgcagacggcaaaccgatcctgaatgaaacggtcatttctgaactcgaaagcctgttaggtactcgtagactgaccatgcctcaaattttccacgatggtaagcacatcggcggctttgaccaactgcgtgagtacgttcgcacgttgggataaatattaacacctttatttgattggtgttattatgctcactaaacgtattactaagaaagattatccatccattaaacaagctctttttgaacagcaaaacggcttgtgcgcgttatgtggtcgccctttagagggtgaccttgaaaaacatcaccttgaccatgatcatgctctatctggctctaatgccggacgtgtgcgcggcctcctatgtaacctatgcaacggtacagaaggtattgtaaagcacaaatttaatcgttctggtctggtttcccgtgatgttgattacattgaatggctagaaagcctggtagcatacctcaaacgcgactattcacaaaaccgtatgcacgacaaatttatacccgataaggttaaatggtttacacgccttactaaatcggatatgatagccgaaatgatttctatgggctttgagtactcagaaactgaggatcgcaaggctttagcaaagagctatagaagacaattaatgaaggcaaccaaatgaaagtagaaaaacgcgacggaacaatcgtcgatttcgataaagaaaaaattcgtaatgctgtgtataaagctggcggtacgatgacggatgaagacagtgcgattatgcttgtgttgcgtagtcagatccgcaacggtaaagcaatgaagatttcacaaattcaagaacttgttgaagaatctttaatgaagacaaatccgactgttgcccgtgcatatatcgaatatcgtcatgatcgtgatatcgcccgtgaacaaaacggaaaattattccgtgatatcaagggtttgatgactcttagtaacaaagaattaaccaacgaaaacgcaaacaaagattctcgcgtattcccgactaaacgcgatcttctggctggtatcgtttctaaacatatggcgcgtaaccatattctaccgaaacatattgttgcggcgcatgattccggtgatattcattatcacgatctggattacagcccgttcaccccatacactaactgctgtcttgttgacctgaaaggcatgttagaaaacgggttccgtatgggtaacgctgatatcgaacctcctaaatcaatcggtgttgctactgctcttatggctcagatcaccgcacagattgcttctcaccagtacggcgggacaacctttgcaaatgtagatcaggtgctggccccttacgttgaaatgacgtacaacaaacactttaaagatgctgtttggtacggggttcctaaatcaaaacagtatgcgatggaaaaaacggaaaaggatgtattcgatgcgttccagtcatacgaatatgaagtaaacaccttacatactgcaaatggacagacgccttttgtcacgatcactttcggtatgggtactggttggcgcgaacgcatgatccagaaagcaattctgaaaaaccgtattcgtggactgggtaaaaaaggcattactcctgtattcccaaaactggttatgtttatggaaaaagggattaaccttaatccggaagacagaaactatgatattaagaaattggccctggaatgttcttcaaagcgtatgtatccggatattattagcgcggctaataaccgtcgtattactggctctagcattcctgtatctcctatgggttgtcgtagtttccttagtgtgtggcatgatgagcacggtaatgaaattcttgatggacgtaataacctgggcgttgtgacgatcaaccttcctcgtattgcgattgaagccgaagcacaggaagatgaagacgcgcatgatgcattttggcgtatccttgatgaacgtctggaactgtgttttgaagccctgatgactcgtattgatagtctcagaggtgttaaagccagtgtagccccgatcctttatacagaaggtgcgtttggtgtacggttgaaacccgatgatgaaattctggaactgttcaaaaatgggcgtagttctatcagtctgggatacatcggattgcatgaaactctgatgcttttcggatctggacagcacccattcgaccggatcggttctcagaacatgggtagactgattctggaatatctacgcgctgcgaccgaagcatggaaaaagaaaaccggatttgggtttagtctgtattcaacccctgctgaatctctatgtcatcgtttctgcaaactagactatgagaaattcggaagtatcaaagggatcacagataaaggctggtacactaacagttttcatctggacgttgaccgcaaggtaacaccgttcgagaaaatcgactatgaagccgattatcattacattgcaactgctggacatatcagctatgtagaattccctgatatgaaaaacaacctggaagcccttgaaaaagtctgggattatgcaatggataaactggactacttcggaactaaccttccggtcgataaatgctttgaatgtggctctgatgatgaatttaagccaacagaagacggttttcattgtacccattgtgggaatcaggatccggaaaaaatgagcgtcacgcgccgtacatgcggctatttgggtgctcccgctgtccgtgggttcaacgaaggtaagaacaaagaaatgatgcatcgcactaagcatcaaaattaatcaaaaagcccttgacttcggttgagggcttttgttatattgggcctatcgaaaaaggagacagattatgaaactgactaagaaaatgaccgatgtagtagcatgtgcgtttgcattaggctacaaagttgaaaatcatccaactcgcgttgaagtcatcaaccctatcaagggccgtcctggtttggttctgtgtgaagacggcacagcatatcgtaatgatgtctctttagaactggcaactactatccgcaccgcaaaacaaatgaaagatgttctcattagcggcgcaaaattgagggctttatgatgtattggacaaaagataaatttgtttttcgtgatgatacgtgctttgggactgcataccgaaacttggctattcgtggcggttcgttttcggctaatgatttgtctaaggtagtatttcctattaaagttactgagtatgacgtattcggtgttaaaggatttactgattactttggtacaaagtttgaatcagaatcctacatttttactaatagcgatcgtgaattgttcaaaaaacacgttgttgttaaagaaaaaccgctattaccaaaagaagatgaagcaaaggaaatctatgatctcctgaacatgcttgacaatctcggtacttgtcatctgttcggtaaacgcgcccgtaaagcgaaagatgttctcaacttgttgcgctctcgccggaattacctgatccgggaagctgaacgcaatctgaaaaattcagaaaaacaggctgaaatccataaatccacccttgctaaattaaaggctttgtgatgtttccgttatacgctaaagtgcgtcgaaatgtcgggaattcatatcaggaatggagtgaatggctacgtgaaacaaagtcattctacatttcaaaagcaactgatatgaaaggccgtaacattcgctatcgtaaacccagtggtaaacgagtgaatgggatagattacattgttcttgattcgattcgggatgatatacgataatttaactttgaggcaatattatgattttcaacaaaacaaattcacgtaatttgaactatctacgctgtgaactggaagctaacgaaattgaactgtttttctgtggggctacagatccggaacacaaattgcattgggtatcaggtgagattgtaagcctaaccgaccagattgttgaagaggctacccgtcgcgatgcaatagttaaaattggtgctgttgatgtgaactacgaaggacatccttcatttttcattcaatattatccataaaagtattgacctgtatatctgaatgtagtaacatccttcttgtcaactaaggaggatgttatgaaaatcaaaaacactgctactgaaactctttgcaacgaaattgcagaaatgtactggagtaaaggtcacttagaggctatgaaagagtttcaaaagtggtgtgatacccaaaagttagctaaatgggaatacatcgttattgttgaacggatcaaagaactgatcctcgtgaagaaaggtaacatgaaatgattcaactgaaattagacacaaatgcggtgttaagcctgtttccggaaggttcaaccgcccgcgtagatctccaatctgctatcatcaaaaacgtggtgaatagcgtagttggtaagcgtgttagcgaagaaatcaacaaacggatccaggaacagttagctgttctaatgccgaactcatccgaaattacacagatcatcaaatctgaattctcggattacgtcgaaaaacgttatgggtattccaatgtttttgatgtcaactatggcaatgttcgcgaactgtctggtaaaatcaaagaatcggtaaaacagcaatgccaaaccattcttaaagatatcgagaaagaggcgattgctcatgcaacagaaaacattattgcagacgaagccgcgtttatcgctcgcgtctcgaataacctggaagttactgtacgcaaagcagtaatgcaacgggttaacactcagttcccagacattattgacgaagcgatcagagaacgtctgtttggtgaaaaagcatgaattacgaccgcatctataatatggatgtggtcaacggaaaagggatccgtgttgttttgtttgtgactggatgcaatcataaatgcgaaggttgttataacaaatcgacgtggaatccttgcaacggaacaccgtacacggaagagacagaaaaccatctgatttctctgttgagtaatccgcatgttgatggacttacattaactggcggcgatccgctttaccgtgacaactatcctactatcctaaaactgcttgagcgcgtttctaaggaacttccaaagaaaaacgtatggttatggacaggatataccctggaggctttacaggccgacccagaacgttctaagctacttccttacattgatgttctgattgatggtaagtatgaaaaagatttaccaactaaaaagccgtttcgcggttcagataatcaacgtatgatcgaattcgctaaaaaatcgatagaaattaaaaatatttcttgacctaatgtgtaactatggtaatcttaccacatcgtaaatgacgattaactttaattgagagataatatcatgatcctgaatttcaaaacccgtaaagaagcgcgtaactactgctggaagtggaacattcccctgaaaaccatccgtaatacagggcgcggttcttgtccgtggacagttcaagcaaatgaactgaaaacgttcgtggttggtaaaacttacaaactggttgaccgtgaagggtttactaccaattcacacggtggatctaacaccgcaaacactatccaggcgacacagatcgaaaaattcctgaataacgaggtaaaaattatctcgaaaatcaattcagatactttcaaaattgatcatactccggaaatgacttttagctctctgcgttcgtgggaagctcgttatttcgtcgaagttggcgcggctccagctaagaaaaagaaagccaaaccgaaaaaagccaacgttacggctccggttgcgcctgttgcaccagcaaccgcagatcttgatcaaatgcttgatggcggttcggcaatgtcggttgaactggatccgactaaatttgttgaaggccgttcgtatgttctggttaaaccgcagcaatttaaaaatcgttgtggcgctaaccacgggatcaaatcatataccgatgaacacagtaatggtgtatacaccgtttaccatacgacttcactcggtcaccatcaattgagcaaaacggtagaaaccattgattcccagaccggaaaagttggttactatctgcttgattctgaacgttcgttcttccgtgaactggcgaccggaactgttgatgaacctgttagcgtttccggtaatagcgctatcgctatcaacgtagacgaagcggctaagaaagaagaaatcgcaaaagcaatggcacagcttgaagaagcggttaaagcccatgacgacgcgcttcaaaatctgcgtactgcttccgacctggttcgcaaagctgctcgaaaagtagcagaagtaagcaagtaaattaaactgggtgctccggcacccttttttatgaggtgacacatggaattattagaaggtaaatcttataccctgaacatcgacgctaaagaatttgcagaaaaaacctggcgaaatgctttagctgaattgatcaaaaacaacggctatatcacaatcgatcgtattgcgattggggatactgaggacattgcttatgttctgcaagatgatttcgaatatgagatccctagccatatctggaaatacttcaaagcatatgatttgccggaagaagaaccgaagatcgctactaaagaagaagtcgccgctcctgttttaaatttcgtatcttccgatcctaaaatgtggatgactgtaaaacctgttcaacaagatatcaatgatctgcgatttgattatccttttgtcaagcggatcacttcgatttctgtactaccagcgccgacggattcacaggcacttgaatttgcattacagcatgttttcggtgataataagctgtacgcgattgacaaggaagctgctattgatgaacagaaaaaggaaatcatcaaccttctttctctgcatcaacaacttgaagcggtggaattgattgagcgtatgctttctgatacaaagaaagatatcattagcaaaatcactccggcacgaaggaaagtaattgatgaaaatcgagatttacggtattcccgaatcgcttcataaatgttatggttgtattgaagctcggaaattacttgatgagcatggattagaatacgaattttattctgttctaaagccagcaaataacagtgttgggtttgattacgatcggccccgcattgaagagttagcgaaacgtgttcgtagtcgaagcatggcatttacttaccctcggatctttgtagatggtaattttattggcggttatatgcaattgaaagagtatttgggtgaagcatgaataaagaatacattcgcaaagtagcaaacgctattcacgcaacaacgattgattttctggaagggtttgatcatattatccatcccgaaacgttggatagttgggaagccaaactgtttaaaagtatcaatgaacagtttccggaaaaggttaagcgctggtttatcagacaggaaatcgtagcaacgatccttaatgaacgtggtgttgaggcgttcggtgtaacccctctatataagcgaaaccagattacagacgaaacaatcaagaaatataaaaagatggttcggaagtaataaataatcagttaaatggccttcgggccattttttgtatataaatattggtattgaatacaatataggaaaaaagataatggtagctaaatcattccgcgcacgaagtggccttgatgctgctggtgaaaaagttatcaacgttgggaaggctgatcgtaatacgctgagtgacggcgttaacgttgactttttcaatgaatttaacggaatccagcagtatgacccgacccgtggttattctcaagacatggcgatcatttatgcgcgtcgtatctggtacgcaaaacagaatattgcttcccctgctggggctttcgacgaatccaaatggatcgcaactcgtaatgacccgaaatgggtttatagtaacgtaaccactccagatggtagcattattgaatctggtagttacattatggctgatggacgctttactgaacttctgtacctgctgccggacaacccgacagagggcgacgtaatcacgtttaaagattgtggtggtttagtaggtgtgaacagtatccttgttaagtctaacacccgtcagatccgtttacgtactgtacaatcggcacagtatcgactgacccacccgtacatgatcgcaacgtttatctataacggtaacgtatggcgtgttgctgaaactctggataaccgcgattctgagatcgtgaacgcaaccggaacaggttcattccagttacaatctggcatgacagttttccgtaacagtgctacaggtaaaatcactctccagttgccgaaatatgcaaatgatggtgatgtgatcacaacctatgacgctgataaaatgaactctatcaacgtagccgttttgcagatttatccaggtagtggacacactattactgatggtgcaagtactggtgttacttcggtaagtagccagaaatccggctttggtatgttcatctttgatgcacagaatagccaatggaaagtatatgatgctgataaccgtgttcgtctgcgtcgtatctatagtgatttaaacgcagttcctaacgattacgtttttgttactgcaaacccttctgggactataccaaacgttactgttacccttccaactgatgttgctgatggtgatcgcgtttacgtatccctttatatgatgggtaaaaaccagaactgtacaatcaaagttaaagatggtacaacggacaagatccgcaccaacaaaaatatgatgcagttcccgcagcgcaaagattatccgcctaatgattggtttagtgtaacttcattagcttttaatgctggcagtgattacctcccgtatatcgagttttcttatctgaaagctacgaaagaatgggttgttgctaattatcgtccaatcgttgaacgtgttgatgcaactaacagatcgcgtactggtgttattgctctggctgcacaggcagaagtaaacaaaaacttggaagataaccctaacgacgaaaccgctattactccgatgacgttagcaaataaaactgctactgaaacccgtcgtggtattgcgcgtttagcgacaactgctgaggttaacaaactttcaaccgatacctatctggatgatgtgattgttactcctaagaagctgaacgaaagaacagcaactgaaacccgtcgtggattggcagaaatcgcaactcaggcagaaacaaacggaagcaccgatgatattacgattgtaacccctaaaaagttgcataaccgtattgcatcgccgaccttaactggtatccttgcccttgttgctactggtggtgctcctaacaccaatacggatcgttctcaggcgggtactggggtttatgatcattcagattatcagaaagcggtaacgcctaaaactcttcgtgagtataaagcgactcagttacaatctggtgttgtatggctggcgtctgaaaccgaagttattaacggtactgttgcaagttcaaacgttccgaccgttgttactccggaaatgctgcacaagaaaacctctactgatggtcgtattggtttgatcgagattgctacccagacagaaaccaacgcagggactgattacacgcgagcggtaacgcctaaaacgcttaacgatcgtgctgcaacggaaacgctgacaggtatcattgcaattgcaaccactgccgaagtatcagcaggtactgtaacgaataaagcgatcgtaccgtctaaactgaaaggttatctggacaatacaagtcatattaccgttgctactgctgacgggttaactcaatctgggactatttggactacggttaacatcggtattcaatcagcaactgaaactcaacgtggtactttacgcgttgctacgcagtctgagacgaacgcagggacattagatacagtatttgtcacccctaagaagttacacgctaagaaagcgactgagagcgcagaaggtatcattcaggtggctacggctgctgaaactaccgctggcaccgttgcaaacaaggcggtttctcctaagaacttgaaaaatacaattcaggttgatacttcatggcaagctaccgatctggtacgtggtactgtgaagctgtctaaggggcttggtacttggtctggtaatgatgtggctggttctactcttccggatgatggttatgccgctgtaggtgttgctgtttctccgtatgaactgaacttaacactgaaacactatctgccgatcggggctaaagcggttgatgctgataagctggataacctggattcttcccagttcattcgtcgtgatgttaatcagacggttaacggggcattgactctaacgaaagcaaccactgtacaggctgacattaactcaacagccgacgcaagtttccgggtaatgaatgttagtggagatctgaacgttggtgatggttcatcgatgggtaaacttcgtttgaatggtggttcatctaacgactggtcaattcaagcaagttcagcctctgggcgtattgcaatgatctcaacgggtaatactggcacagttcatctttctgtgtataatgatactcgcggcgttgtagctaacgttaaattccaggctcctgaaattcaggcgattagcaaagtgactctgggtaatgatacagtgatcactgctgctggttctgttctctctatgggtactaaaaacaagacaactaagatcctgacttctgatgctggcaacatcgtagcggaagaatctgcgaactcttataaagtctttactgagaagaacgcgcaaaccttgctgaatcctacgtatgtacgtaaagcaggtgatacgatgtctgggcgcttgacggtaagcaacagttcaattatcattgcaggtcaagcggcttggtcaacgctggatgcagtaacagaagcatccaggggcaactggacggctgagatcacagcatcggcacaatacaacttgcttcctggttatgcggttccggttcttgaaccagatccgattaatccagaaatcatgattgtgacccgttatacctatgttaaagcaccgggtactttaacgcagtttggtaacggaactgcattcacttatcagatttgggcacctcgtccgacctctggtactggtgttaatgcgctggcgcaatccttctggatccgtcaaatgaacccgatcacgggtaaatttgatgagtggggccgcatgtataccagcaacaacccgcctactgctggtgagattggtgcaacgtctgctgttggtactacggttaaaaacatgactgttaccgattggatcaaagttggtaatgttaagatttacccagatccggttactcagacagttaaatttgagtgggtggcataatgtcaaacttaatggcggggttcggccccgattttgtagaaacgcaaattctatcggaaacaaacagcgtaacttacagaataaccgcaaaggcaacacatcccaatgcggttcctaatcagtatgagtttacactaaatcaaaaggcggtagggacaccgcctagtgttgggatcaacgtatggagaattaacaatgctgtagttgatccaattaaaaccttcacattatcgaatgataattcagcaactgcaaacaaagcgtttgttgaatatatggatgctcaaccttctgggctgtatttgataatgactaacggtgaatacaaaacaagccaaatcgttgatgattggtttgctaaaaacagatccgttatgtggcaaggcgctgatttcgctcagagattcccaaattctgcatatgttgcattgtatggggcttcaaaatctcgtatactgattgaatcgttttacgcgaacgatggagttttaaaagaagattcacgcgcatcaatcgatcttgtctatgataacgttggtgatgttgggcgaactggtgtacctttccgatctgttgaagatacggaagaatacaattcaaccaatggatctgaatataaagtatatcctgttgcaaacccagtgatctctaaactggctgattatggtatggctcctggattagctatgatgattgctggtgatttttacgccagcaaagcattattggatgctggatcaacaacaagggttactgttcgatggtttacgggtactgctcaaacttcatcatcggtgattgaagttcctgcaaataaacctgatgagtggttacgatttgaacagttctatacgatccctagtggttgtgatggatttaacgttgctgtatctcgttatcctaaacccgctacggatagtttatctgcgatccgtaactttgtgatggttcaggtatctgctgccgaagctgatcaaaactttgctgcacagtttggggttaacggtatcagaatgaacaacatgatcgatggcggaacaccgtatatatttgaattgcctaatactaaggtttatccaggtggtgattattctgcttccgaattccgtgaagttgatgcataaacaaaggcccggaacatcgggccttataaatatgtaaaaaggggttattatggcagatttaaaagctggttctacagtcgggggtttacctatttggcactccggcacatttccgctggttccggttggtaatactctaacctatcgcggatataaggtttatactgaaaacgataaaccgcaagcatcaaataacgacttcgtttctaaagcaagcggtggtcaatatttgggtgtagttgcctttaaacaggggctacaaattaacgctactttcacaggcggaagtgaccagaacggtttatattctggtgatggtgatggcgcgacattatcaaaagccaacattgatcttgtatcatggtatggtattggtattcgttcatcttccggtactaatggtcgcgtattagtcatcaacgctcgaaatggtgatttaaacactcagggtaatattacggttgagaaacaaatcagtattacaaccgctaaccctactgacgcaagtcatgcaacacgaaaaagttatgttgatggacagataaatactgtcacaacaaatgctaatagcagggtattacgcgctggcgatacaatgacagggctattaactgccccgcaattcgcgagcacaggcgcggcttcccgtcccgaacacgtaccacggctcgaccaggtaattactaaagggactatcatagattttggatcttattaaggtgaaacatggctgatttagcaaaaattcaattcctacgtagcacagttgcggggaaaacacctactacaagtcagcttgcagatggtgaactggcgatcaacatggctgattatgccatttacacgaaaaatggttcttcgatcgttcagttagcgggtaaaggtatcccagaaacaaataccaaaaaattaacagtaaatgggcctagtgctcttaatgataccgttaccgtagcggaaggtaaaactattactttcaccaacgcggatttgagcgggggtgtggttcgtcatatcactggtaaaaacgctcttaacgatggttggtacattggttctggcggtgagagtaataaagggtttttagaaatcggtacaattgatgacggtgatgaagagatccgtttcgtttcccgtggttctggtgatactgttcgccgtactctgaaacttattgattccggtggtaacactcgcgtaccaggtaacatctatattgatgaagctatgggcggcggtggttctgcttttatttcaaaaaacaaagcatatttcggcgctggtggtgctgatatctatatgcgtaacacggctggcggtgcgacaaatcagttaacgatcactgatggcggtgaattgctgtttcaagcaaaacctgtatactgggacggtcgtaaaccgactttaaccgaattggggatcgggcgggttgaaaacgcgcgtcaacttgagcaagataattttcctgtaactacaggcaacgaaactcgttggattaaagttgctctgttaaaagatccgggttccggtcagagtcgcttgcaactgatggtgactaacggcggtaactatggttctacgcgtagttctatcgactttatcgattgtagtgctcgaaacattccatcgacattaacaagcggtaacgttcgttcttacctgcaagttcgacgtttaggagatactgcaattgataatactaaccagatgcgttatagcctggttcgtacctccgaaggtttagaactgtggtttactcaacgcgcattcattggtggtgttaaagttgctctgctgtctatcgctggcggtgctgctactgaatattatctgcctactggttacacaatctctgcaactgctccggaagggttagttgaaagtgtggttattcgtatctatgacgaaatgaacaaacctaaccttgacgatggtactgatggtattctgtctgttgctaaaggtggtacaggcgcaagtacagcggctgctgctcgcacaaacttaggtttgggtactgctgcaacccgtgatgttggtacaggttccggacaagtaatgcttgttggtgcttacggtttaggcggtaagggtacatcatacaccgtttctaacgctcgcgactatctgaaacaactgcgaactgatggttctcagttcatgcgaaatacgcttggtactgaaattaactatggtatgggcgcaagtttttatagttccgtatcagatgttcatgcggtgatctcggtcgattggaatactggacgcgttaaagttggtgcaactaatgatgctaacttaaactcagataccggaaaaatcagctctcaggaactgtacggtactgcatttaaaccaactccggatgacgtaggggctgttgctcgtactggtgatggtatgacaggtgatctgtctattaccaaagcgtctcccggattccatttgaatgctgagagcggaaactcagtaatttggtttaagtataaagggaatgaaactggtgctgtgtgggcgttgcctaatactgcctcttctggtgaagttcgcattcgtgccagaacgtcgggtggaacgacaggtggagaattctcgtttaaatctgacggtacgtttacatcacctggtgatgtaaatatcactagcggcgctttcaacggtaaaagtgtcaatactcagtatgcgaactttaataacacaagttcaaccacaaccgaacaaaccgtttctattagtggttcgcagcacactccgctgttactgaatagaccgactaactcgaacttgtctatcgggtttaaactttccggaatgaacatgaaacgtttgggtattgatgtaaacggtgatattcgttacggtgaagcagaaaaccagacacaaaactcatggttgttgacttcggatacgataaacagatggactgttaacttcggtcgtgatattaacgttgctggtgtggttaattcaactggtggatttactggccctgttactgcatatgatttgactggggtaactcaggatcttgatgctttaacattgaacaataccgaaccaggtcatattaaagtttatacgtgccgtagtatgggtggcggtgataacatcaccaacaaaccttctggcgtaggtggtaactttattgttatcgttgaatgtctccgtaaagtaagtgataccgattacactaaccgtcaagtattacgcgcatcggacaataaacgcagttgggaacgttggctaactgttagcggtactgctaaaacctggtcaccgtggagaatgaacgttgttagcggaaacgatgacgatgtatcatttaaatctgttaccacgactacaggaaacctgaacagcggaaatgatctgattgttgctaacaacgctcgcgtaggtggtaacttagggttaggtggtgcttcttcaacgaaatacgctgataaaggtgttgtgattggcaaaggtagtgctctgttagaaactactgatggtcgtgtgattattggtagttctggtggtggtaatgctgttgaattgcgtcctggtggcccaactcaaaccaacaacaggatcaaagtaactgctacctctggaagtggtggtgatactgcgatcgagtatgaacaaggggcgaaaattcgttctaataatggtggcgatttgattgtttctgctaaagcaggtcaagcaatttatctgcgaccgcaaggtgatgcatccagcacaaacgaaacccgtattgatgcaaacggtagtatcacgattaacggcaatattaacgccaacggtacattaacttgtactggtggttctgttaacggaaacttgactgtatcaggaaacgtagatatcactggaaaccagttaaaaagtacatcgctctgggttactggagacgctgctgttaatggtggtttaacggttgatggaaaatctagatttaatcaagaatttagtgtatccacctcagttaacgttcagaacgacggtaacagccatgtgttcttccgtaaagcagatggtacagaaaaaggacttatttggactgatgacccaggtaatgttagtataagagcaggcggtggttctggtccggtatggaacttctggaacagtggttcttgccaattcccaggtgctattagtaactacaacggaattaacagcactactaattaccctggtggcggaaacggtgcgtatttaaataccgctggcttaacaagtagatttagtaatggtgcttatgtttccttatacttccaagaatatgtaggaaactaccaccaagctattcttaacgtcaacgggtatggccaggacaatagtttttactttagagctggcggtgacttcttctgtactcgtaacggttcttttgataacgttgagattcgttctgaccttagagctaaatccgatgttaaagttatcgaaaacgctttggaaaaagtagaaaccttatctggtaatacttacgttcttcataacacctctggcggtactactcgttctgctggtttaatcgcgcaggaagttcaagaagttcttcccgaagcagttactcaggatattgaagcagacggaggtttattgcgtctgaattacaactcagtaattgcacttctcgttgaatctgttaaagagctttctgctgaggttaaagagcttaaatctaaactgagataatgtaaggggcttcggccccttttaggagaaataactatggcagtaacagggccgtgggtaggaagttcggcaaaggctgaaactggcgaagcatggatggcgcaagctggggccaaattaagaatagggacaccgttttggatgtctaatatgattggacaaagcgtattccatttaattttcagaattaactatgcgcaaggttcttctggcgatccatctagatatagaggattctttaaaagagggttagcagtaaacataggagactcggcaaaccaaccaacgttaaatgcatttcctggtggcgaagtagggtcattagtagccattacaaacattaaaggtgatccttattgtttgtctattttaaatggggctgatagacgagttaaagtgtctatatttaatgcagcaggtggagaccagtatgatgtttatttcagcggaactactatgagtgatggttggagaagatataggtgcgaaaacgctggcggtcttaatgggtattttgaggctagaatggataaccagtttggtgctttattagaatatgtttgatagataaaccaacaaactcacctcataatattaaatagattaaaaggctaccatataggtagcctttttgttgtatcctaaatatacgtatagtaacctaagaagagtcttataaaaaatggctgagagaaatcccgtagataaactagccttatttgatcgggtaatctcgtttgtgatgggtgtgaaaacatggaaacaattgctgataaaaataattctaataatggttatgtttcttatgatagtaacttggtacaaatggactgatatattcccgatgataaaaggtgcccttgtagtcgatacaagggctatcgaaatggaaagaactgaaaagtttaatcaatccgcgttggaacagttgagcatagttcatcttacttccaacgcggatttttcagcggtattggcattcagaccaaagaatataaactattttgttgacattgtagaatatcagggaaaattaccatcccagatcgatcctaaaaacctcggcggttatccgatcgataaaacatccgaagagtacacgaatcatataaatggcttgtattattcatccactaaagcaagttcctacctaccgacacgtgattttgtgccagtagcttatacttttagttgcccttattttaatcttgataactactattctggatcggttttgatggaatggtacgcaaagcggcctaatataccagatatgaagctaaacatcatatgtggacaggccgcgcgtattttaggtcgagtgaggtgattaacgtaatgctggtgttaaattgtgtgttcttccaatagcccgtttgattgctttaaagaagttcatcaccgggctatttttctcgtaaatatcccaaactttcaatttgtcccacggatccggaacataatcttcattccttgccgaaacccccaacgtaacccgcctgtatccagcgctgtcgtgataatacacgaagaatggcctacctattggcgcaactttacaacctctcttagcggctctcatagcctcatcgaacgtcattgatacccccaaaaatttctatgcatgaatggtcgaattccgatagtttcactcaaaatgaatatcggatgatctagctcatcgtggttttcttcgtcaatgacgatatcccaatcagtagccttttgttcttctaccgtggcaatgaacacctggtttacttcacacttgcggtgtgtacgtctgatgattgtatccccttcacgaaacacaatcatatcagggttggtagtgcggtgcgcggttttacccgcgcacacttcattaagcatatcttcgtatgtcattataaaacctttacacgttgaacgatggtttgtttaacgtctttgtattctccgtgctctttaacggttgctttgaaagtgatttcatcaccttcgtttgcaatgttattaccgaagtaaacaacaacattaccatcaacattaattttggtcatgaatctttctacagaagtgtagtaagaaacttgagtatatcccagtgaaatcactttctcaacggttccggtcatttccagacgttgtttgatttcaccgatgtggttagctttagaaatgcgttcctgacgctcttgttcccactgttcgcggatttcttcgcgtttggcgatataatccttctccagtgcaacacccatgcagtaagcgcacacggcgtcaaatacagggctgtttttgttgtcttctttagactggtcagcccaccaaagaacagtaaacattggcatttctgcaattacttcgcctttacgcttgccaatcggcatgatccctttttccagcagttccagtttttcagtatcgaacactgacagtttaccgcgacgttcgaacagatcgaaatctgcaaagccctggaataccattttgaaagtatcagtttcagttaaacgggctgaaacacggtcgaaatactcacgcgctttcgcttccgctttctccggatcggtagataagttgcagatatagttatcagaagtataaccgccacctctacgctcaacacgcaaggtatacattgcatttttacgaccagaagaaatgaagtaagtggtagtaactacggttgcgttagtcatggtatttctccttaaagggtatctcgtttcgatatggctaatatagcaaaagcccttgaccgaagtcaagggctttttaatcattcattcgaatctttcattgttttatgaagatgaatatcaaaaattttccagtacgcctttccgcgaggataaatttttgctttgtcaatatcgttgttgcttccccatgtgttgtttgggccacgacatcgattttttatataatctgtatgccagaataagcgctgaaccgatgattccgtacctaatggatcttctttactgaacagaatttgtatactcataagaagaacccagtgcgaacaatcagatcgattttcttttctggttcaaacggtgatttgctatcgatgttacactgatagaacataccaacatacttttcaggaatgttggattcacgcgcccatttcaggttatcatcggtattcggccccagcataaggttaacaacatcaacagcataatcctgttctttggtgttgccggaaccgtttacataatgcccgtgggcggttttgaggatctcaattacttcgctatcgtcagtttcgactttgtaaagcgttgtattttcaggaatttcttcaagaatgatcaaagcggttttcatcacacttacctttgtgtttctgtttacgttttgcttctttaaatgctcgcttgcgatcgcggtgagtagaagcgcggttgaaatcatgtttcgctaccaaattattcatataagccccttaaagaaaaatatttaggggctttcgcccctgtatcaatccagcagtttgcggatcttgtctgcgatacgtccggcgcgggttgcacttgcagtatgatcgctttcttttgaagccagttccgccagcttacgctgatgttcttcttctgctgcttggcgatctgctgcaacctgtgcaacctgctcattatcgtgagcaatacgcgcttccagttcagacagggttttgtcgaaagttgctacgatttcatctacagaacgaattttattaaacagtttcataatttatctcaattggttagttttaatcagtatacatcaatatggttgaaattcaaaatcataaatgtcattcagtgcgcggttccactcggtgtagttttcaccagcaccataacgcatttgaatagcactttcgaacgttgatccgttgaggttcgggaaaccgaacaggtttttgattttgtcatgtgctacatagtacagagaagcactttccagcatcgcaaccatcgcagacggttcgtgttcgcggcgcttgatacgtaacagagtacgactagcaccagttttacggcgttgatttggtgctacgtagaaacggaatactacgcgccctgttttatcatcaactaccaggtaaaacccgttttctttcagatccacgccttcgaatttcttgaaggttccgcgtttcatgtcaccaattttaattgcatatttatgaatgtcaagtcttgtcagaattcttttcatattttttagataccagtttgcctaattttgtaatttcgcctgtttttacgttaacaaacaaggcgatgctcagaaatgggatgctaatcactacgctgatcaatgtaaacagaaaacgtatcacaaaaagaacagcacgttcaagatatcgttgcatccacgcgattcctaaacaactataccccactataaaggttgatgcaatataaaattcaccaaatcctttacgaaatatgtaacctttcccggattctatccggtcgtcggcccacatttcacgggcagttttcagaatagattcaccactagcgcgggtttcgttagccgaaggcatgtttttaaatttcatgatagtctcctatgcgcccagaactctccaggcgcggttgtttagttagtaatggctaaaaccatatgtaacatcaatcatgactttataacggcatacacgcatttttgcgttattgtaatccactgggatcgctaccacgtcagcaggatccacctttacctgaatgactctaccaataccgcccccgtagtgtggaaggtatgatttagccgcaacgtgtaggccagtagaacaggtgcgcgttttatcttcgtctaccatgtttcgaggcatggagacagtcacaccaggactattatcaaatttgccagtagcgagatctttatagttatcgcgtacacgtttccaggcaaggaaacaaccatcatcggtcagttcaatgtcattatgtacaaggaacccgtaaagctggtatacagcatcgcgtgaagggtttcgcatcaaccgttcaaagaagttcaccagatgttcatacggacgatcgttatacatttcgcgaatgattcgttgagtgatatcagaatcaaacactacatctttatatagaagctgatgaccaatgattttaatgttgcctttgctatatgttcggatcgcttcttgagtatccaaacaagttacagcacctttgacatcaccagctttcagcatttcatgcgctttcttaaagttcggatgtgtttcacccgccatgaaaacgcgcccttcgtatacaaccgtaatgaacgattcagatccgatcatacgcggtacagtgtctgatactttaggcttttgttttacatcccttttcttagggaattccgctaacttgtggttgataacgcgcccaatggttcgggcgcttacgttgaactgttgggccagtgctgttttacttgcccccgtcaaccatccattatagatagctttctgttgtacttcgtcaagaattttgaccattatttccaccgtattaatttcttaaactcactgagattcttttcgttgttgtaaatcggacgaattgaataagaatcgctatgttcaacaagtgaagccagtaacgggtttagtgatttaaagatttcccatgcctgatcaacacgttttttcatattgctgcgtttaacgcgcattgatgctacagattcacgcagaatcggacaacgcgccctggaaagatttttaccatctttctcatacccttccagacacactatacgttcgagggtatcaacaatcttatacagtttttcattatatcggtttttcacaatccgatcaagcgatacaccaaaacggctatgcaatgcgtctgtttctgttgagtgttccttgccaatccatccaggcaagcaattatctttcaatgccttttcggatttaacatactgcttgcacagcatatcatcaaagcataccagatttgaatctgggatccacttccagaggctgttacggatagcaaacacaacagggatcccagtatggcgcatgatacgcgataaagtagattctttcattgctgaatccatagacaacctggaattttcaccatctaagcggctatattcatcaataccatacaaccgaacacctggggctttatccagtgataaaaactctgattttgtcataaacagagaagtttttgccagattgccgttactatccaactcataacgatatacggtcggggtttttgggcgcggttctgaatttttcggtgcatatagcgcttttgatttttcgcgatctgcatcatagatctctttttcttttgtcatttcactggtacggagatacacaatttccgattcatcaaaatgacctttccgaacgatatcattaacaatctcacgctttgaatcactatcgtaatatgcaacaaagctaacacggcttaggttatgcattttagcatacccgacgatatacggtttaaccgtgttggtatccacttttaacagaattagtttcttctgtttccacggataataaatgcgtgtgatgtcctggcgtttggttgtttctggcttatacttgctccagcggcctccgctacccgttacctgataccatgcatctttaccgtcgtattcgttcgcccaatacccagcaacataatcatcattatatttgttgggtttgactagttcgctatggatccagccaatagaatcaccgttgatgcgaaaattagcatctttaccaacaaagttttgtaccattgaaggcagagaatggaaccacgtcagtttatcacgaacggtttgtaacttatcgaattctgatttaactcgattgaaatacacccggctgatttgtttcagacgttctttaacaatccctactgtcattttatccatactcaactcttcgcgagaaggcatgaaatcaagttcaccgattgggaagtcaataatatacgtatactggctttctgtatagcaatagaacatcgaggtatcatacaaatctttatccagaggataaatgatgttacccatgcgagcatatacaccgctagtgtatgctgatttatgacggatcaccccgctatcgttggttgcttctttcggctgatagttgattttgagaatagaagcaccaacaaagttaggacgaatatcagtaaatgattcgtatacccttgctgcttcgttttcccattctttgatatcttcaaccttaaccggaacggtgatagtaaccccgttaggttcgtcgctttcaatctcatacagaggatcgcagaacggttccccatcatccatatagattgtgtaaccgcatttgataccgtcttttacagattcaactgtgaacgcatcggcatagcaaagcggagatttgcaacccagacccatagaaccgatcaggtcgtttgaatcatttttagttgattcgaagtaaacggtaaacgcatcactaacgaaatcaggagacataccgatcccgtagtcacgaataacaaaacgaggatcaacagcagttggcaactggacatcaaacgggttctgatttcccgcttctttgtgtccatcgatcgcattacaagacagttcgcgaatgattgcgcggatcttgtatttgtatactgtcgaagaaaggatcttatacgctttcttgtttgcgcgtagagatagtttgtttcgtcccttgctggtatctgtaccaactcggtagattgtttgcggtgtatcttcgcgtaatttcattgtttatttctcacttaacattaaaaataacttggtcacaagagtacttcgttggctttttgttcagaccatattctactacttcgcaataagtgtcaaggaattttaccaatttttcttcctcgacctgctgtttcttcatatcaaggataccccacacgatagccccgataatgatagaaaagaacgcacaaaatccgaatatggtcagatattttcccaatctaggcgcattataacgtgtcataccttacccctctttgcgaatgtatgcaagttcttcatgggttactggacggatatacagacggccttttgtatatgccttgcgcccactgatccaaatgtttttcatatccttaacaccgttcatcacatcgttgtaaaacttcttatcagctttagcctgatagacttcacggccttgataatctttcatgaacaaacaataaaggatctcattcttatcaactagattagcatcctttgtagttgttttacttggtgaaggtttagcacccaggcgcaaggccatagcttgccacactttaccatgttcataacctcgcccgacaagagcatgagcgatttcgtgtaaaagagtgtctaaaatatcctcgtagatatcttccgcaacatgacgaccagatagttcgatcagttttttggcataactgcaacggcccagagtttttgtaatgcgtccattgatccggaatgtccaaccattactgaccaaaccgtgtttttccatcatggtacgcgcccagtgggttacttccattgcactacgagttttcaacattttagaatctcctttgcttggtacaaaaccaatatagcaaaaagccccctgcattgcaagaggctttgtaattatttcaatttcttagaaagttcttttaaatcattgagatactcaattttaggggttgtttcttcccagtatttcaactgtttacgcaattcttcggcttcgtcttccagctttttgctttcgtccgtggttagatggtagatgttcatagccactaacatttcggcatgattctcgcaacctatccacgtagacacaaatttaaccgcttcgctgcgactaagaccacgtagagaatcaggagattctaccatttgagcaataaacgcaacctttgccagtgctttatctaacgcttccttagtttcctggatacgcttattgatacgctgttgatatacattcatacgaatatcaacgaaatcctttagaagcgtttcagggcgttcgtatgagtatagtttgccctcaaagataacgttaatgtttgggtttgaattttcaatcaacccgaaatcttttaggatcttttcgcgggttaacccgttggcatactctcgcttgagcgttacttcataacgaaaatcttctttcgatagatccttgtagctaacgataacgcctttttcttccagcttgtcaaggattgcaatgtatttcacacggtcatatttcactgggatctcggtgatcaccaatttggttttaccttgcaattcatacgtgccgtaaattgtaccgtctgtgatttcacctttaaagtaagggtatttcagatccagtgtgaaatctttatcattcagatatgcaatgcacccgttaacaaccgatttaggatcatgaggcggaatgtttgttgcatatgcttttgcaatcccgctaaacccgttaaccagtaccatcggaatgatcgggagatagtacgctggcggtacatgttccggatcttcatgaactggcgttaaatcaccatccatataaattgctttgaatattggcgatagtttacacttgatgtaacgaggtgcgccaggtttcttaaccaaacgggaaccaaagaacccatcacggtcgaataacggaatgttattgcaccagtgcgccgccataagggataacgcttcttctacagaggtttccccgtggtgatacccatacatagcaacaccgccagcgatagaagctactttctgaaatcccgttccgccctgcatagcagagtgaataaagaaacggtgaacgggtttaaacccgtctaccaggtgcgggatcgcacgtgaataaatcgtgtaaagggcaaacgttagcccttccacctgtacaacatctttaatacttctttccattagtcaaccttagaaaatttgtgttttccattaacccaatctttacgcggatcagattcgtcgccgaagcatagttctaacacttctttgtattcgtcgtcaagtacgatgacatcatacttcaactgatcacccagaacacgatcgtaatcttctttgcgtaaagaacccagccccttgatatatcgtacatcttttgctttatcgcgtaacggtgcaaactcatcaagagaatagaaccatttttcttcgcgcccaactttagcgataacgatcggggttcgaatatatcggatccgtttctctgtgaacaaagaaggccaacggctaaagaatgcaagcaacagggttaagatatcaccgccgtcaacgtcagcatcgaccatgataccgatattatcataagtcattccggaagtatcaccaggatgaatattgaggatagccattagttcaaacagttctttgtttttgataatgtctgtaaaactcataccccatgtattcagaggcttaccacgtagcgggaaagcgccttgtgtttcttcattacggcattcgatgaactgaccaacagcggaatcaccttctgtcagaaacaatgttgtttctacccctggagtatcgataccggaagccggaacgtgtttagcaatctttgcctttttcgctttctttttcgctttggtgatcgcggcggcttctgctgcttgtttacgaatcaatgcggattcaatgatcggagtaatgatttctggagtatccataatcatttttgcgatctttttgtagttcaaattcgcatgattgttaaactcacctgctgtatttgctaatcgctcttttgtttggctatcgaatgcaggtgcattaaagttatgcaggaataccacaagagttaagcattcttttacacgtgctttcgggatctcgatactatgctttttcttgatcatcggttcaagttcagaatagataccatcgatcatacactcaacatgaacaccgccatttttcgtatccagaccgttaacaaaggatttctgtttaaacccgtcctcagtgctcgccagaatgaagctgagacgattatttgtctgaacaatggttttatccccatacatggaagcatacagcgggaagcgattagagagcgtttcgccgttatatgtgaatttcacggacgggaaagcaacggcaagggccattaagcgatccttaatcacttctttggtttcttcatcgataccagttacaccaaacatagagaagtctggagtaaacttaacagtagtaccctgttctttactggggctggttcggtaatcgatgttctgtgcgccgtccgtacagttaatggttactttgcgtttcccgtttgcagtctcgccaataaaaatcgagctataacagtttgtcaggaaagaaccaacaccattcatacccatcgttacgcggtttttatcatcgaagttagaacccgattttgccatagtccatgccgcaactggtttaggaactattttcccatctggggtttttacatcatcctggggaataccgcgcccattatcagagattttaaccagattatgatcaatggttacatcaatcttattagcatgtttgaattcagttcggatcgcttcatcaatcgagttatcaaggatttcgttgattattttaaccaacccttccacgtactcaaccttgcgatattggcccattatgaaacgttcatgcgcttctttgttaaccgacccgacgtacatatttggacgcaaccgaatatgatcgcgatcgctcatacaaaatgattcgtcaacctttgcgccctttttggctggttgtggtttctgttctggttcatcatctgccagaagaaaatctaaactcatattcacctctttgtttaatcactgacattatatagggttctatgaaaaagaaaacccctttcggggtttacttgttgtaagggaaaccatcccgaaccatttgcggtttgtccaccgttcgttttgcttcgcccccgcaatcacactctttcggttcgtcgcggcttgcgatgcttgacatcttcgggaattctttttcgcacttggtgcatttataggtataggtaggcattaataaatctcttttaaacttaacatcttaactaaacgggctttgtctatgtcaaaaacacattgacgtgcgcccggatacaacttttcaacttcgtataccatgcagacgaaaccaacattgtgcatgtactcgcgttcatatgcattgaaccaacgagaaaggcgctgtattgactgaaacccaaaatataacccagccgcttgaaagtctatgttatctttttcaaggttgcgcatcaatcgattatcgtcatccggcgctggatgtcggttatcatccatatcaatatagatatcaggattcatacagaattgatccagccattcagcagtatccattgacaaataacgattgacatatgggccgctttttgtttgccatttttctgtacaatcattccagaaagaacaagaaaattccacacgatatacgaacataatataatcctcacaagtaaactcaaggtttacaagtacgataccacttatctaatttttctgcaagagtatcgttgataatttttgcaatttcgtaccgtccgtgagtagtacccagttccaggtaaatcacatcaagtgcgcacacaatcgcatcaatactttcttcaacgatattaccgccgcgttgaggctgaatgagacattcgctgatctcgccaacttccgctgataagtgatgaaccacatcactcttcgtgcgtttcttcactttatgagcgatttcaaaaaacttatcaagtacgatcgccgtttcttctcgcgttgcagtattctcggatgtcgtctccgtttgttgaacaacgtattttgtaaaatagttttcaaacacgttgaaagggatcacatgaggaacaccattcaaaaacaccccttctttacaaacatactggatttggcgcggaatagacaacccgccgctgcgttccaaatgtcgtttaacgcttgctacaaaatcgaactctttcccgtatccagccgacatactgtgatacgtgagtaggccaaatgcagaaacatagagatcattttctttatacagattcatttacaatacctttatggtagccaaaaatataacaatcaattgaaggacgttcaccagggaagtgaatgcattgcatgattcgttcagccattagatcttctcccatgtataccgaagtagtttcttcgttgtaatgggtatcatacgacgttttaagcgtcatgcccggaagccctgcaatgtgcatgaatttagaattggtgcaaggttttcctacttcaccgttaatcatcaacactgcattagttttacgtgcttttctcatttgaatttcaccccgatttgcgatacgttccattcttttacttcatcaacaatatcataatggttgatgtatggtaaagcaatttttaaattactcgcgtcttgaatgttgcgtaagaaacgagtaggagaaagaagacacaaccgctcggatccgttgtttcctttagcggcaaatgatagggtttctcccccgtcaatcttcatatcaacagaaatcgttttgaattctggtgcgtatgacgtgattttgccgttgtctctcggcgtactatagaaacatacactttgtgggacattataacgatctgtttcaatgtacatgtaatcgccgtcagtcattccccacgcggtataaagggatccggtatagtcaccaaaggaatttttaaaatcttccttcgtggtatatcccagcgagcgcaattgcataagctggttatgctgttcgattgcgtcggctttttgttgttcctgtacttgcgcatcaatcgtttcttgccaggaattatacgcatagtaacccacaacagcgattacagccataacccctacagctttccagattttagcgtcttcgtttttgttactcatgctatattccttttaagaaaaagggccgaagcccctttgttaacgaagataaaccacataaccgctttggtcaatcgcgcggtctgcgtcattgaagatattaccacgaatgccttttgctggtgctttccagcttgcaggtttcaggatattaccatcattatcgatgaaggcggcaacagaacgctgattgaacatttcaccagtttctttgttgcgagtatcctgaacaacacgatgatatttgcggcctttctccagaaagaaaacagtttcgaaaggagaatcttggaaacgagcgttacgcgctttgtacattgcttccatgaaaggggctgctttttctgcgaggatttcgaaagtgttcatggtatatctcctaaagtgtgtttcgtttcgatgtaagtactatatcaaagatggttattctatgcaaggcttttttcgttatccatcaaatattttaagtgttcttttaatgcagggagttcgttcaaatggcgttgcttaactttctcgtactctttgcgttcccagttttcaagattgcttgccaacgcttcatcacaataagcgatcccgcgttctgcatcctgaactttctgtttccattgtgcaactgcttgttgataaagagaaccgttaaccatcataataatttcctcccttgtttcgatggggtaactataccaaagctaccccagaatgttttaacaaaaagtgctattagtaggtatccagtttatacattttgcaccagttcatgaattcttcgaaagtctgagtattaacacgtttttccttcttcactttcttagtgattacaggacggttagtaaaacgtttttgcattttcacagtgattgctactttatcgcccaggtcttcaaccttttcaaccagcgcccactgagaaccgatttcagcaccgaaagtcaaaccaacaatctcacctgctttaacgtgtgctgcatattttactttaaccattttcgtattcctttctctgtttcgtttcgatgaatacaagataccaaaaagcctcccgcaatgcaagaggcttctttaacaaaaaatgctattttatttctttgagtaatttacggatcccgccgccctgtgtcttatcaaagattttctttgcatcaataacagaagtgattatgtggtagttgttcccttttccgtcaaactcaaactcgaccttgtagtcactacgaaatttcacaaaaacaaattcacctgcaaagtgcttacgaaactgtttttcgttaatgtccaaccattcctgtgtatcatctaactgatacatgcgacaaaacaggatcgaacccattacagcaatcacgacaaggatagctaacgcgaattctgacatcatttacccctgtttactgattgacggtgcaatgatttaggcacaaccggatttcggtatggtttgactttatggatcgtgggttcttccccaaccaaattaggaaattggttgttccattccatcgaaaatggatagggtgatgactttaactcttcgatcatacagtttactaaacggtcgccgattacacccaaagccgccccaataatcgctatacgcataaatcaccccttaattgtgtcaagtacagtaaaccagtcatgaagccatatcgttgttcttacagcgatatacgttaacaaactaatcaatgataccgctccgcaaatagccagagtaatcaacagccggatttcaaatttagtaaaattcatatcaatctcctttctaagaacccaatataacaaaagccctcaaccgaagtcaagggctttgttttaaatttttactagttttggcaatcgaagaactataccaggatggatcagacgtgcatccggaatagaatcacggttgattttagcgatatcaggccaaagttcaccaacaccatacagtttctttgctatagaatataggctatcacctggttgcacgacatagcgatcagattcaatcttaaccagatcctggttaatgatatcatcaaaggcttttgcttttgcttcgttaatcgtgttcccgtagtaatggcgatccataatagttaatgtgatcatcgtttctttcctatgctgttttcgtctgtctcttctaaggatggaggttcttccagccccagggcataacgtttagcatagattagcatcaatgcatctttagcgcaatcatgaatcgaatcatgctgaatgaatccatctaacatgcctttacgcagtggacacgtggtcactccgcgagtcagtaaacggttttcaatagctgtacgcacatcacggctattccagaacacggtcggcatatcttcaaacgtgtcaagtttccctgtcatagttcgtacaacatcggttagcatagaacgatcgaattcagggccgcgcgtataatcgtatgactgccaacgactcacaccgtcagccgctaaatcagcaaagaattgtcgatgaccttcgtacaaatccatgtcgatatcggaagggaacaaaaccctttgcgcttctttagattgctgtttccaccattcgatcgttttttcatctttgatgcgttctggttgtttccggatgtcaaatttgtactttcttcctttagcaatcagttcctgaaaggtaggcggatcataaggatcatcaacaaacggaacatagctaagttcagctagttttccttttggaaacgggccaatactttcataatcaaatacgaaatctacgggtaaatgactcattcgcgaccccgcttatacgattccatgaaataggccaatgatagcgcgacttccggagtaacatcaacggattcgatcatgcctggagttaccgccatcatcccgaactgacgaagcccacaacgagcaatcgatttttccagtcggatcatgttttctacagcctctgcgaaattgtccagatgttcccaatcgtggtaatcttccattgtagaacgatcacttttcaaaatcagatcggcaaccaattcagcataaaggcgcggaaggtgaatattcatttaaaacccctcaagcatgtttttgttttcacgaatgttacgacccattttcaaagtatcaatgatcactgcatactcttcaaaagtgaattcgatatcttgtgaaatgtttccccacgtgtaggtcggcccgttaggacagtataacccaacttctttgtttgcgttgacaacgcagcgcaattttgcaaacaacaaattgatatcgatagaattgaacccttcgagataatcaagcccctctctaccaatacggtcaacttctcgcaaaatcttttctacatctttgactttaacaataattttcataataacctcaaagggccgaagcccttagacataatcaacagtgaatcgtgcgcgggtagttcctacataaagcaactgcttacacaattcataatcggcgtatgcgtatgcatcgcgcgtatacatgtatgaatgatcatacgtgcttccctgacctttgtgatacgtacaaaccggaagcgccttaaccgtctggaacttgtttttgatttgccagaacgaataccagggtgctttgtatccggtttcctgtttcatcttcttatactgaaacgcgacgtagttcaaataatcgcctaaacgttcctgcataaccggatccgcgataacctgaatatccgctttcgtatcctcgaacatcgattctgttttcatcaagaaataatcgatttgcaccggatcgcatcggtcagctttgatagtatcagaacgcgggatgatttcaaggattttaatttgctcgttgttgttatagataacttcaacaaacgaaaccccattcacacggccttctgtcactaacggttcttgcatcacaaccacttcaccaacaatgaacggctgatcagttttgtacaagtgtttgcggatcactgcgtttaacttgtctacgtttgcgttagtgtaagcaaacatacggttattattcaggtcatccggagtcttaacacggctaaaataacgtctcaggaagtcaccagcgttttcgtgcttcattacccctagttcaccattcatgaggggcattaacggcttaccgtcgcgtatagcgcgtgatacctggatgattgggtttccttctgcctgacgcataatcttatccatgcgaatgacatcaaaaatttcctcatcaaagaacggtgaaagctcggtgatcccttcggtattaacaggacggatctgatccttatcacccaatcccaggatcaccgcacaactcggaatagtacgcttgatgatacggaatagttctttgtcaaccatcgatacttcttcaaccacaaacacacgacattcagacagatcagcggcctttttgcctttttgctgttcaaatactcgtaactcttcgttggtcacggggctgattttcagtgctgagtgaatggtcgttgcatccatacccaccgcctcagagagaacgtttttagcctggtgtgtcggcgctgtcaaccagatcccactaatacccagttttttcaatgtctcaaacacaaattttaccagagtagttttaccaacacccggcccacctgtgatagtagtatggattttgtttctgatatttttaatcactcgatcatgtgcgtttttctggtcttcgctcagatcgtcaaaagttaattcgctcatactttaatcaataccccttgaatacttgcgtgttcaataaaccaacgcatatctttctttttcttttcggttacggtttccacttcttcctttcgaaagaatcggctaagaccactttgtttaactggattcatcttatcattatattctttgataatcgaatttttatactcgttagcatcgtccggagatagaaacaacaaaggtgttaactctccttccttaatgaaggggattttaaacccgtctttatccttactaacgacgatataatattttgtaatcattctcgcccctcataacaaacgtagaatattccaacaaaccaaaacactgatagtataatcagtaaaagttttctttcaacgccatttacgtgaaacacacaccaaccgaaaagatatgtgatcatcgcgcaaacaccataagaaagaaccccaacagctactagcatcaaaaagtgccattgatcgatactataaatataataaaggagattatacatgatatcgaccgtaagcacaatagttgttcatgctcattatacaacaactcccgtatttgaaggagatatctacacgttcaaatacacttttcctatcgaacagatagttcaattaatgaaaaatagacatcctatcggatggattaccccagcaacaaaacatctactaaggaacaccatcgatggactaccgtaaaatttacaccaatcttatagaaaaagcaagagatagaacactaaattgttacacagaaaagcatcatatcatcccccgatgtatgggaggttgtgacgatcatgataatttagtagaacttaccgcagaagaacattatgtagcccatcaacttcttgtcaagatgtatccacacaataataagttgatatatgctgctaatatgatgtgcgtcaacgcaacacagagaaataataaagcatatggatggatccgcagaaagtggatatctcagatatcaaaagacagaacagggacaaaggcaacagaagaacaacgcaaaaagatgtcagaatcccataggggagacaaaaactctatgtatgggttacgcggtaataatcatcctgcttatggtcaaaaaccctggagaaatcaaataacaatgaaaggaaagcatgaatggaggtatgctgggattttctatgactggtatattaacgatattaaagctggaatctataaaagacaaggacacaagagaatgctacaagaattgcaaattgcaacaatctcccgtgttcctagaacatcaatcgagttattcaaaaaggggtggaacccttacgaagataccgattgggttgagtgggctaataatcaatagctgttggcccaacgacgaagattttcggcttgtttaagagcgtacatcttataaattgtttctgcatccatacccaatgcaataaacttacatagtacaaagtggaattggtcgatcatttcaaacagaacttctaaacgatcctcttcactcagatccgcaaatttagtattgcgcaattcctggtgatttgctttccacggtttccaaacaccggacgcaggtttaacaccgcgagacattccacccagagcggtatacaattcgcgggtttcatcggcgatcgcgtcgtcttgcagtttcagccaatcaaggatttctccgcaagtttccagattatccggacgcggaacccaatgcagggtatcagacaggctttgttgtgcatggttttgtaaatccagcatggattgtaaaggatcgccattacgggccagaaccttttgatattcggaatctacaaattccagatcttccgggttaaccaggtgcgcacatgaattaaatacaggagttttatcagtagtcatatcaatctcattttttcggtgatttgtcccacgacttaaatcgaagttttgccgtgagtccagaaacagtattctctttcaaatactgcataatttcaagtttagttgcgccgtccgtttttatcatttcgttgatatctttggaaggccacgggcatttatcccacattacaaccttttctccagcctcaatcaatttaaagaggcggtgagtagtatccggatgacgtgcttcattgtcaagaacccagacacgcatatttttataaggaacctcagaaagtgcaagctgtccaccagtgatagcaccagcattatcaacaaacaggctatctaatggcccctcaagaagataaaccgtttttagcggatctatcgtatcctgtccgtaaatcttggttgattcttcacaggctttgattgtgatatatttcgactttgccccgtcgcgtaaagcacgaccctggaaagattcaattttccctttcttatcgaagatagggatcactaatctcggttctggttttgcgatcggataggtatccggattcaccgtattaaccagttgttgccattcgcgagtaaaccacaaccgatcccacttgtcacgggggatacaacgattctgcacatattttatgatcggatgttcatccggcaaggtatctaacctttcgcagaattgaagagtaggaataaatttcttctcttccttcggttgttctgtatgcgttggctttaacgaattgcgatccttaaacgattccatgagataatcacggtaatcgtctggataatattctttcaggaatacgctaaacggtacaccataaccacagttaaaacaaccacaattcatatgatcaccctttttagaagggtagatccaaaatcgttttttgtacttgtctttcattgagtcgccgcaaatagggcaacgcgcattgatgcttaatgcccccgatttacgaacgatttcgctttgaggcagtgatcccatgattcgggttgcaaattctatatcaagatacatttcttacctcagttgactatctttagatcctcgtcgattataccccgcgctgatcatttcgtcatgttctttttggcattcaatacaataacggcaacccttcacgataaccctacgtttttcgggtatcggatccccacaatcaaaacaatgcgttaatgattctccgtttctgatttgagaacgtgcaaaatctatcgcattgtctattgttgcctgaatggtatcttgaacaccgtcagcagggccaaatccaaccgccattgtaaatcctcctaatcaaatgatttcaatatcatagactaagaggatttttctgtcaagaacttacttgcttttctgttccgtcaagcattaacttccaaccacgaaatgcctgtttaaacgaataatttattgcaatatcaattttatcagaaccttttcgacgattctgataaacggtcgcgttgtcactcatatacatgatacaaattggaaaccatgtataatcgttagcagtagcccagatagtgatattcagcggaggaattatcatttctttttccttttccctgcacgggtaacgcctaatactttcggcccgatgttggttactgctccagtagtcacaccagaagcaatcttttctgtatcgccgccagaatcacccgcgaccatatcctctaacatgcgccccttatcataatattctttgaggcgtggaacgttcaacatgatttcttcatgctcttgttctgtcagattgtagcgattgcgtaaggtatcatatgaactggttaagttcataaatccagtcatatacggaacagaattcattcgacgcttgatatggcgtactgaacgatgaaaaggagaatacgcttctaactcttcttttgttttggggttgcgaattacttcgccttgtccatcaaggatccccagcttgtaagcagtccattcagtccagggctttttgagtagccggatcatccggacgctatatgttaaatccatatttttaactaattgatcactcatgattattactctattgtgaaagtgaataaatcagatttggtttcaggttcaaactccatacaaacaacctcgcatagtggtttaacccctttccaatcctccaggtaatacccagtatctataccgcatccaggattcataacaaggccagtttcatcaagaaactttttgcatttacttgatgtggtgctgtcatcttgtcggaaacagtgtgttttcgaataccggaaatttgcagacatttgagggattatgaaagttccctgacgcgcgatctgtgatgcacgttcgattactttatactcaaattctgcccctgtatacttacccttaaaatcagaggttttgattttaccaaaaggcggattactgatcgccatatcaaacacctgattaaattcagttgttaaggcgtctccatgcacccaggaggcttctggtacgatacgcttacctaactcatagtatgtgtgatttaactcaacacagacgatttcacgcggcgtattgtacatcatgtaatgaaccatagcgaaagataatccaccgataccagcacacaggtcaataacgcttccacctgtgcaagcatcgattgtgaaatcgcgagcaagtccaataggggtaaagaacgcccctaattcagagttgtttgtaaacgcgccttcatgaaagttttcgataatgaacaacttctcttcgtaagttagcgctttgtcagagtgaaccagatccattatctgattgtgtttcttggtttccgctttcgttaactttgccattgtcccagctatacaataatgttgattcattcggatagaattcccatccgtccacgtatccggtttcccagtcagtagtttgttcaaaaccacagatccattcatacacacccggaggcatttcgatagaatcaggaagcccgatatcttccgcgctgcgtccacattcaaagaatgcatcgtgaatgaatggtcgagataataccgtaacataaccttcatcgtcaacagctacgatccagcgcgaactgtgaggactatcgaacttcggttcttcgtccatatccgcttttatttcagccttacaaaaatcaatattcatttcaaaccctctttaacaccctctttcatggctttccaggtagaacccgcttcaccattcagggcggcgaatacaaatagtaagatagcaaggacaagattcacgccagcaatcaccatgattttgctatacacgaaaatgtaaggcattgccaccacccaccaactaaaagaattaccagttacgatgttgagtgctgcaagtaagaaagtgataacgaatgcgattttcataatgtcctcctttgttatgattaaggtatcatcttttgtgaaagaatgcaatacctacagatacaaaaaagcccctttcggggcttaatttttatgcgttattgatgagataccgaagaacgtttttcgcttgttcctcattacaaccaactttgaaaccaggttcgatagggaggaagttccagaggaaatcaacacttccttcaacgtcatctttgccttgttccagcatcgctaacagtaaacctttgtttttgatgctgtttacgattgcgtcaaaataaccatcgctgaaatcaacattcgggttcagcatttcgttgtaagggttgttgaatacgttcattttgaatctcctttgtttaactcagtatcttgtctacgtgagttatattaccacaatggagattcaggtcaatacctttttacgattttttgaaaaatttttcgtatttggcttttacccagcgatacatatcttcggccttgtcactggcaatcagtgagaacagcagatagatcgcaacacccaccaacacaacgcctactacaatgtagacgggtaatagaactgggaagagaacccagaaccatgacatatgcgagaagccgaacactttagcggctgcaaaaatcagagttagtccagttagcagtttgatagccggaatcggaatcgttatagtcttagtcatttcattaccttacattttttgcaataaacagtgttaaacgcgggaatacgtttgatagaatgatcattctcagtacaaaaccacctactaacaccaacagcggagaacaaaccaaccaccaggaagcagtagccataacgccgattgctgctaattttaggtataccatcacaccaaacaaaataattaatataagtttcattttagattccattgtaggggctttttcgcccccagtcaattaaaattgaatgtcagattttgcaatctgtgccattttatcacgtcgggtagattcagcctgtttaatcatcgggccttgtgtctgttctactgttttaggcatagtgttgccgtggtagtcagatttaaacccgtattcgctgttgtcggtatccatccagcgctgattacccttgcgaacttccaacttgaacttgttgaaagtgttcttatcgccataacgggatttgatttgcttgaacagttgcataccctgatcagctaactcttccgtctcgattacagctaacataaaatcagccgtagcaggtaaaccagcggattccgcaacatcacccatactcacatccgaactatcccatgcagaacgaccaacctgtgcgcctgtccacattacggtattagtttcaacagcaagaccgcgtagttcttcggcaattgctttaaccagaatataggtattctcagcacctttaacacgggttgaagtacagatccccaggtaatcgacaatgatcacatccggaacaaactgtttcttcaatttaagctctttcacaagcgctctaaagtggtttgcacctgcacccgatgtagggtactgcttaaccaccaaacgcccaaccttacccgctttaaggcgctccattttgttcttatagtctgcgtatgtaatgttcccttcgtcgatgtcatccatagtcacatcaagaaggttagcatcgatacgcttagagcaaacatgctctgccatttccatagaaatgtaaagaacgtttttaccctgttgcagataatcagccgcaagagaacataagcccagtgatttaccaacgttaacaccagccatgatgatattcagtgtaccacgttccgcgccgcctttggtgattgcgttcaggatcgggataccaaacggaattttcatcgccttcgattggtaaagcatccaccgtttttcataatcttcgaaatagtcatgacctactgaactatcgaatgaaattgctaatgcttcctccatgatttcagggatagccccaacaccaggaagtttcttgttctgttctgccagtggtttttctgcgttcgcctggatttcgattgcacgagaaagagcacgatacattgctttatctttgcaatatgtttccgtttccttcattagccaatctaaatcttctggcgcatttttcagcgactgaatcgcctttttcgtgtcttcgtagactacatcacttagatttcgtttgtcaagcgcaacctctaaagcagtttttgacggaatgccgttgaattcctgtacatgtttatcaatgaggtcaaacaaaacttgcgcattgccttcgaaatattcctttttcagatggggccatgcttggacaaaatatgtcccgttataaatcaggttagaaaatattgtatcaacgatcattgtattgccttataccaggttgctgaacatcatgaaaaagttgtaaaccttttgtttgaatacatcccataatgtcagtttaggctttgggacaactgaacccttttcaagctctttaatctgtgcataaattgcatcatgcaccagcgggatcaacgcttctttgtcttcgtctggggtactgaattctactttcagcccatgatcccaaaacaccttatgaatataaaccagatgcgcaacacctttttcatcgttaatcagaagttcctgaataacatctttcatcgcttcatcaatataattctttgctttgctctcgatatccatacattgcctcggttatggggccgaagccccatatttttataaaatttcgtcgttttcttcgatatcatcaaatgattctgggatatcgtcatcatccagatcaggatctgggatgctatcagtgctgtataaatcttccagcgcggaaccatcgctgatttcacgatctgggatcttatacttttcttcgatagctttcaagaatggttgatgagtaaacagaggacgccagaattcaacgctatttgtttctgactcacgccatttcttttcttcaacttcgagttcgccagtctcagtattcaggaaagcgcggttgcgccagcctttggttacggtctgtacaaagttcatttccattgccagatccaaaaggccagaatacatactaataccgccttcataggtaacatgcagcgggaattttgatttctctttcacgaatcgagatttttcgatattcatgatgaaatcataacccaccacctcagtaccttctttcacctgttgtttacccaggatgatcgcagtatcagcggaatacattaaaccagtaccaccggaaataactttcttgctgtacatttcttgtgtgtcataggtatgacagatacaaaccatcgggatatccaggtcagccagataaggcgtaaccatacggaacataccttttaatgcttttgctcgcgtcatatcctgtttatcgttatcagacagcgcgtcagcaagttcttttttacttgccgtgttgcctactgagtcaacgaatacaatcaccttatcaccgcgttcaagcgcgttaagctggcttacaacgtcattacgcaactgctcgaccgtcgtgatacgagtatacacaacacgatccggatcaacacccattgatttcagataggatttagtaacacctttttctgaatcgtagaacaggcacacagcatcttcatacgttttgagataagccgctacagtcagcaaacctaagttggatttgaagtgtttggacgggccagcgaaaagggtaagaccagaagttaggccaccgttaaacgcaccggacaacgccagattcagaatcggcacacgggttcgcgtgatggtaatattgttgaatacgtcgctttcagaaagtacagatgcagtttggctattcgagtttttgatcagtttttttagtagtgctttgtttgacatttaatttttccgatttattcattgtcattctatatatctcactagttaatgaaaggggccgaagcccctagagtttaccagtcaccaaacaggtcgtttaaactggcacgtttttcataatcaattttacatacttctgtgatgttagtcaatggactaataacatgtttttcaaacatacccggataatctacccatgcgagaatatcactttcgatctctgctggtagtttatttccggattgccacgcgatgcaatcagcttgccacgggtttttatcccttagtggtagaaccattaccttttcaccttccatgattggcgtaacaccatcaataccagcagtgaaacggttaaagaacagcacccctttaatatggtttggtgttccttttattggatatccagccccatcacgatatttcgaaatgttgttggcagatgatacaccagcaatttccctgtagtcaagtgccttatattcttcttcgaactttttataatgttcgtgcaaagataattcaccttcttgcaggatacggcggatcgcttctttcaggaatactttcacagaggtcggagtactcgatcgctgtgtttccatacccatgattttcaatttcggtttttcatagcgggttccttcggagtcccacacgttagccgcatatcgttttttagcagtccagaaacttcccaacccttcggaacccaacggaggcccagaaatgatttcacgatccataaacatcaggtgttccacgttgttcatgtattcgcaaagttcacgataccctttatcgatcatcggttccattctttctttagcaaagcgatccaggaagtcaacccaatggttattatccttaaatttagcctcaccgccaacttttgcaatcacattatccatgcaaacataaatggagtcagtatcacagtatcgaacgtatgcatgatccgtagtaccgcacaggtcgttaaggtattcgtttaccttacgttcaatccactggatagccaactgcccgaacatggtgatcgcgctggcgtttcgtagatcgaagtatcggaagtgttcattacccaacgcaccataaagggagttgatagaaatcttacggttaagctgtgctgtgttcgcttgtgcgatcttcttctcacacacgcgcttaactgctttaagcatttgttttgtaagagttttcagaactgctttcgattcatcactgaaatctgtatagaaatcaaagtcaggatcaaccatttggttatgtgcgtctgttaagtgttcgagttcgtgcttgatgagttcaagatttcgctcacccgccatcattcgttttttccacatcttacgctgatcaaatactttcttgatctctacggggatcacgcctttgatatcacggcggaacatccacccgttaggagaacagctaaattcatcgctagggcgcggcgcggtcttattaatatactcttcaagagcacgtaccgcaaaacttcccataatcgtttcagggcttatattcacctgtcggatgatggaagggtacaggcttgttaagtcaaacgataccatgtatttgtaaggcccaggaactggatccttcacaaatgccccagggtaaggggttttagtatggcgtctgttttccggaataacaaccttatcttcacgcagagagttataaatgatcgcgtcccacgttttcagcggagacataacccctgggaagttaatttttgcatagtacgctacagacagaaccagttcaataaagtttcgtttaccgtcaatatcaagtacgcggataacgtcaacaatgttgtacgtgatgtacagttggtgatctcgctggcgtagttcagacagtgaaccttcatactcaactttatttttaccagtttcgtattccgcgatcgcgtccagacggtaagatggttgtggggtaaaactgaatttcttatacagcgccataccatccatttgagcaacgccggaaatgtcatatcctaattgttcgttgccgtaagcgtcggtagtggttctggcggttactttaccaaatgggctaaaatgccttaccacgttttgaccgaaaatgttcaggtatcgcgtgatgatatatgcaatatcgaatttgtcagagttccatccggttacaataacaggggttcgctctttccaatctttgatatacgcagacaataacgacttctcggtctggaaagaccgataaacaattttgtttaaatcttcttcgctaatgtcttttcgatcaacgtttgccgcgcaccattccgcaaggccaccctcaaccagatcgtatacatagaatttatcttcaatgctatcgtaatgggtaatcgcatcgattggatattttgcttcacgcggatccggaaattctggggcggtcacctcgatatcgatagaagcaatgcgaatgtgttcgcggttgtattcgatttcattccggtacatgtcagaaatgtaagccagtcgataatcgtccatacctagcgcttccatcccaacatcgcgcatacgctgcatccagtttttagcttctttgatgctgtcaaactgttttttgaggcaaggcttgccataaatgtctttgtatggggtttctacgccattcatagcgtgttgatacattacgggcgcatatttcgtcttacgtacctgttcggtgccgttagagtcaacgaagcgctcataaatggtatctcccatttgttcaactgataggtaaaattcattcattggatcttgtcttctccattaatataatgttccattgtaacaccacctacagcaaattcaagtttactcgatgttctaaaaccaacaaaccttctgctaacaagtcacggatctttctcagttgaacaagctggcgttcaagtttaaacccgtcgaataacatgctgaaaatactggaattgacactatgatattttgcttctgcaattccctggttaaccatcatgatagctttgttaaccattagtttcctttccgttactgtatgttcatccagttgacaggttgcaagggaaaccaaatcatcataagcacgttggtcaataacgttatccatacgggccgcgaaaatcttattcatgtaagtgcggatcattgcgcgtcctccattcttttcataaagacttcttttgcttgttggatcaagcccagagattttttaatacgctcatagaaatgagtggtttcaacttgattgcataacaatgtgtactctgaaatgttacgatcgtaaaatccaggaaagtagtgttgtgcatagctgtaagtgcgggtatctgacagattgcaagttaacgataacaagatgtcatcttttacaatcgggatgatcaaagtttcgttggatttgattgaatccatgatttcgttaatagtcataatatatccctctcaatggtgtacaccaaatataacaaagcccctgcacgaatgcaagggctttttgattagtgaccgatccggtacttgtacttgaggatccaatctgctttttgcgagtgagtcagtacgcggaagttgttttcttctgcaaacttcaacccagtggttacgatcttaaccatgccccactcttcgagaagtcgcgcaatgttgttccggcgtagttcgtcttcttccgtcatatcgacttgacgaccatcaagtttcaacagttctttaaaatgcacgataaaatacttaccttgctttttcagaatgtggcacgattgccagagcattttctttttgttgttcgcaataccaatacgggttagcgtttcacggatctttaaaaaagaatcgtcgctgattagttgaatttctaacatacatcaccattgtttaatcaatttttccaatttcttttgttcagctttgtttttcacaatacccaacaaagacagagcgacctttgcgtgttttcttttccaatcctcgaacattccgaggtctttaagttcctgcaaatattccatcgctgtacgtgtatttacactgtatttttcgcgaaggatttcgataataattttctcttcaaaatcttccgatagtttagcccatgcaccgaagcgtttagccttcctaacagagttgagataatagttatagtgcatttggtcagagatactaccgcctaccagattcatcacataagcgttatatatcgtgtctatgtgctggctcattgcgttgtctacaaagtacttatcatacacatcatcgataaccaacggagttttaccgttgttgatttcgtctatgatgttaaacaaggtgttttctttatccttgccgtactctttgaccagttcttcaaccttatcccaatctttagaaagccaagcggattcatgcggggataactcttcttcatccagaaattccgccaggctcatgattacgcctcccagaccatagaaagcatcaggttcatcaacagatattgcagatgaatttctttattcatcgccagcccgtattgcgcgttgttttcgcctacaatctggatcagtgcgattttcgaatcctgattcacgatagggtaaatcgtatcagtcaattttccgataaaggtatcgtattctgacgcatatttaataacctcagagcgcaaccctttatagttcttttctttcaacagggtaatgatatgagacacatcagaaccaacgatctcatttaggatccctgcatcaatttcaccacgtttcgagtagaacccgatcgctttgataatagaacgcgcatccggataatgctctttaacaaacgctgcaatgactttaggatcatacttgatattctcgatttcaaggataccgaaacaacgcttgattaactgtttcatcagttcgatacgttcagcatcagacggaacaccgaatttaacaggaggacaacgagaaagcagagcactatgcacaccgttaatgttgttcgccgttacaatcacagacacgtttttactgtatgcttcgataaagctacgtaagtgtttctgtgcttccgccataccagaacgatcgaattcatcaatgatgataatctttccgcctggtttctgcgtcattgatgaagcaaaacgatccagttcattacgaatgaagtttacaccacagttcgaaccgttgacaaagaacacctcagcatcaacctcacgggccaatacaagcgctagggtcgttttaccagtgccaggggaatcagatacaagggtcatgttctcaacgcgcccagatttgattatgccccgcatagcggctttgtcgccagaaggtaaaatacactcttcaatcgttgttggtcgatagcgctgatcccatgcaaattcatcaggagatcgagagattttaccgtatttggtttcgatgatttcaatattttcactaagttccataatataccttcaaaataaatggtgtaaaagaaaggggccgtagccccttaaaactatcttacttgaatgtgctacttgcttcaagtactacgacgtaagcaacgccgttatcagaagagaattttgcggcccctttggaggaaatctctactttgtaatcgctgttgatgaactgcatgttatcaatcttcatatcaaaattgaaaacattgtcgccttcatactcaccgacttcaacagagaaagttgattgactttctttgcttttcgcggtgatgaccagtttaccatcaatcggttcaacggacaggtcggtcagtttcatcatgcgagacgctttgatcagtttttcgaaatcgttagccgtaatctggaaaatcagatctgctactggcataaccagacgttttttcggtttcgggatcgtggttgcgtctgctgaacgttcgatgatcttcatcttgtcaccgcgaatcacgatttcaccagtggaaatatcgtgagtgatttccgcgtcagtgccgacgatgttcagcatgttcaggaatgagttgagatcgtagataccaacatcttcatcaatcacatcagcaatttcagcttctgcgtatacaacgctgttgattgatttcgtcatgatgaatgaacctttggtcagcatgatcgaagagttgatttgagaaaagtttttaaggatatcaatagtttgtttagagaatttcatattcagcctttagttttcaataagtgttacttaataagtgattttacaacggtttccgctgctgtgtcaagcatatcagccatttctttaacggttgtacgcttcggatcttcgcggcgttcgctggtaagtttacgatgttccgcaaccactttttcatcaatgtcacgataatgtttaaaacgttcctcttgaggcatagctttaaacagttcttttgtttcgtccgagagtttagcaacccaggatttacggacgcggttcatgtagtcaacaaaaacattactttcattcatatatttcttctctaacttagaattctttgggtgggggccgaagcccccgcttgtattacatgtctaacagtttatccaggtcgtcatcaccggagctaacagaatcatccaggtcgaacggtacgccgtcatcttcgcctaccggaaccgatgatacaccaccagatgatttcacatcagatgtctgattgtcaaacttagccatttcgttatcgaagttgctcagttcgctatcaaggtcagcggaagcgctggaaccagcagaaccgatcgaactacccataactttattgaagcgagtagtcaggtcagccagcggtttgaattcgctttcggcggtgatcgggcggagatcgctcataccttcgaaaattgctttctgaacttcttcatcgtcgatgtttttgatcttagccggaacaccaaacgaactatcgtcatagttaggccaatcaccaacttttttcgctttcagggtgaagttagcaccatcaaacggacaggttacagcaatacccggttcatcaagttctggattaccgttaattgcggcggtgatcttgtccatgattttcttaccgaagcggtatttgaacaccttaccttcgttttccggagcgcctgggtctttgacgatcaggacgttagcccagaaactttgtttacgaccgatctggctcagtagcttatcttctggcccgtttttgttggctttagccttctcatacagatcgttttcggaaatgtacttacatgcaggacagccgtcataatcgccgtgggtagaggaacagttctcaatgtaccactggttgtttttcttgaaagagtggctcacgatacggacgaacgccagttcatcatcggaacgtgctgggaggaatcgaataacggcggaaccgtttttctgtgcgtccagggtcagtttccattctttctcatctttctggaagccggaaccacctttcagatttgctacctgtgcctggagtttagcgggatcttgacgtttaaaaatgctgctcatattctgttttctcgtttagtttagtttgattaacgtttgtttcattaagtttcgatattttatgatatctttttcagtaaggtcaaatatttttctgtatgcctttaacttaatgctaaagtcagaccaaataatatcatcagctacttgatcgtgtttatttatgatacctaaaaatgagtcaaaaatcaaaaacgattcgtaagatatcacatttgacaggacaagtttgcttatgtaggacgttgatgatttttcgctgtacttgaacaccagagacacggggatctctttcattttggcgaattcgtacacgtttttaacgtcatccacaaacacgttatctagtctttgtaactttcctatgtactgcctgtaaaagacaatactatcttcatcaacatcgcctacccagaaatccggattggctacgaagttggagaggaatataaaatagatttctttgaatgtaaagcgttgagctaattttacaaagaaatatctatcctttcgcttgttaaaggcgttttcactaactttgatctgccagttgtattgaaggacatcaaaacgcccctggaaatgagttttcatcgccagatataacttgtatacagacaaaggcacaagccgtgaattcgcctcactatcagcaaacggagctttaaatctcacatgaagccgtccagagtggttgatgaactatgttcaagcgcaaccgatgggcgaagcatgtttcctttgatcgcttcgtcgctaatcttatcaaggatcgcgcgaggaaccgttttattcagcatcgcataatcaatggaattttcatccatccattgtagcgttgcttccatgtatgttgccccctcagaggcaaccagattttcgatatacaaaccgacttcggtcttatttccgatcatgctttacgccttatcgatcatatcatacagttcgatcagttcgttgttttcttcttcgaaagcggtacgggcctgttcgtgatacagtttgaacagtttcccgaaggtttttccgtcgataccgaaatcagtttttgctttggatttaatatccttgaaagtaccgttgaagatctcaacttgagttttcacgttggatgcttctttgatcagttcttttacctgttttgctacatcagggtttgtttgtaaaaattctacactcattttgttacctcaaaaatcactcagtttttcgaacatacgggaaagtttgttatccatgaagtaacgttccattttggctttacttccggattttggagtattatacgcttcaataatcgaattttcaatatcttttggtataaattcgaaatcgcgtagttcctcattttctttgtaacgagcggcccattcaggggtcatcaacgttgtcgggtcgtctgcctccagccatgcctctaactcagaggattttaccgctggggcgcgttcgccttcaaccttcgtcacaatataatcatttctaattttaatacaagcgatactatcttttttatcgcctttgatatttttgtatcgcagatcgttacgtggcgaaccatacttaggcgttacccattttttctggggaggcgaccattgacgaacaccgttatatttctgtagttgtgtaaagtcgctatcagcggaaaccactaatactcgtctaccttcaccaacagcttttttcgtaacaacagcaattatatcatcagcttccgcgaattcaacctttaatccaagataaggcatattctgacggatttcttcgaacactgggttcaggaagttgttcagacgatcccaatcccattctgattcttcatgttcgatctgacgacgttttttgtagtaccaggctttttgcctacgccagtaatttctgtcatcgaaggcaatcacgatttctggatactcacctttaaattttacaacgttaaaccgtaaagtgtcaagcaccagatgacgaatcatttcgatcgtgatggatgcttgttcctttggtttgaagttgttcatcagtgtagcgatggaaatgttagagatatcgatgaccatagtatcatcgggttccccttcatcttgcatcagcttgttcaagttaaacatgcttgcaaaactgctcatacatacctcaatttttcaaagaacggggttattgtagtaacttacgaaatgaagtcaatacaaaagaccataaaaattttgatcaataatacttgatctgatcaaatttatgatctataatttattaattaataattattttactacaatgatcattgtaggtcaagtactaaaatcaataaattttatataatttagatctgatctatagatcattagatctactttaaccttaaataatatagaatgaaatttgattttgtctacagttattatataatattcttaacttcaaagaggaaatatgaatactatgactaaagaaacaaccaatatctacgcagacaatgaaaaactataccctatcctctgtgcatggaaaaagcaaatcgccgaaacaggtgatcgcaaaatgcctaatgagttgggggctgctattatggatattgcaaacgggctatcacgtcgttacaacttcaaccgttattccgaagattggaaaatggatatgatcgatgacggaatttccgctgcaatctcaggactgcataacttcgatgaaactcgttataccaacgtttacggttacattaacaaagcatgttggcaagcattcgtaacacgtattctgtacgagaaaaaagagaacgcgaagaaatataaattcttccttgagcacgtttacgactgcgaagattcagatatggttagtattgcagacgaaggtttcattcaagatctacatgacaaactatctcagtacgaggcttccgccaccaaaaccaaagacaaggaagcggaagtattcccaacattggaagattttctatgaaagcaataattgacttaaacaaaatattaactgatatcgattacgaaattgacttgctaccctacttcgtaaaattggagttgcaaaacgtgggaatcccggttatcatcgatccaactgacgtaagaaaccccgatttcgaagtagaagaaggggttttgtcttatatgataaacgccgaaactatgatcatggagatcacttatgattgatgaagagaaagaagtactaaccagtgtggaagaagtggatccggaagaggaaattcgacaaaagatccaggcacgtgtagaagccgacgcattgaagcgagcacaaaaattcattaagaagaaccggactgagatcaaacgcctccgtagacacgcagaggaagccctattcaggggtaataaggttcagtatgtgtatgcggttaagaaacttcgtgatatgctcaaacagccgtatacagaggatttcattgatacgatgtggaacacttcactggcatcaattcgaaatatcgtagcttcacaacagaagcactaacaaacaagtagccccgaaaggggctatgagggtcttatgagaaagtacttaatgatcggggatacacacgctggcttgcgtcaggacaacccctggaatgaagaaaacctatacaatgtattcgtgcaaatcgtagaacactgcaaagcaaacggcattaccgaggctttccatgctggtgatttctttgatgtgcgaaaggccaccacacaaaccacgatgaaattcattcgtgaacgtattgtgccactactggaagaagccggattacatatctatgttctggttgggaaccacgattgccagtttaaagacaagatccgccctaactcaccgcgagagattcttgatcagtatgattgctttactgttgttgatgaaccgatgacagtaaatcttgatacttctccgctacaatcaatcgatttgatcccgtggatttgtcaagaaaatacacagcagatttttgatttcatcaaaaagtcaaaatctcaatactgcttaggacactttgaactgtccggatactatttctataagaacagtaaagcggatcatgggcttgaaccggatttcttaaagaaatatgatatcgtgtattcaggccactatcatcacgctaacgaaggcgctaacgttttctatatcggtacacctcttaccatgagcgcgaacgatgaggacgaaaccaggggcttctatgagctatcttatggcgaaggtaaacgtgaattaactttcattgctaacccagtatgccaccatcgccggatcacctatccggatcaaaaagatgttgatgttgccgattacaaaaattgctctgttcgtttgattgttcgcgaagttgataacgatttgcctaagtttcaaacaaaactggaagaaacagtttatgagttgaacattgtcgatcgtgtgatcactgattcagaagttgatactgactttgaaatcaaaagcgtatctggattgattagtgagtacatcaacaacatgcagatcactccagaagaaaagaccgaagtatctgcaataatgagtgcattgtatgcagaggttacgagcaatggaaatagttgattacgttaatattttaaacgaagaagggcgatataaagccctttataaaatgtttggatttgatgtgattgttgcagtacagcaggattcctataatgagtatgtgtcattggggttcactctgattaaagacaactatcacgaaacaacggtttggacatttactgtcctgaatagcatggatgaagattccgtgatatactgctttgatagcacgattacaaacatgattagtgatatatcccaaaggataattgatgaaactcaaatttaaaacattgacttatcaaaatatcttgtcggtcggtaacgtaccgatcgtcattgattttgattcagcaaagaaaaccctcattacgggtaaaaacggcggtggtaaatccaccatgatcgaagcgcttacatatgctctctttggtaagtcatttcgcgatctgaaagtcggacaactggtgaacagtatcaacaagaaaaaatgtctggttgaactgttgatcgaatacggcaatgatgaatataaaatcatccgtggacaaaagccgaaagtatttgagatctggaagaatggcgaaaaactgccggaagattcagccgctggtgattatcagtcacagcttgaatcaatgttgaatattaacctggtgggctttaaacaggttatcgttctgggtactgctggttatgtacctttcatggaactgaaaacaccagatcgccgtaaattggttgaagatttgctttctctgtctattatcagtgaaatggacaaactaaacaaatcatacatccgtggtgttaaccgtgaactggatacgctttcaatgcagattggacacgtacaacagcagatcgcaacacatcaaaagttcattgacgaacaacgggcaaaagcaaatcagaatacggcgcgttaccaggatatctacgattcccacgtagaaacagcaaaacaaatcaaagcacaattggtcgaactacaaagccagatcgcagaatgtgtgatcaatggcgaagaccaaacagcaaatattcaaaaattgcgtgatggttatacgcggctctcaatgaacgtagaacagttgcaacgtcttgaggtgatgtatcgcaagggtggcgaatgtccggcctgtaaacagccaattagccccactcctgaacgcatggaagaaattgccgagaacattaaaaatggtactcagaaacttacgctgattaagaacaagcaagatcagctacagaaaatcatggatgatttactaacacaacaacgtacactaaatgggctgaaatccaaatacgaatcactacgcggtacacttcaaaatgaagttgcagcggctaaacgtgttcgggctatcatggataaagcacaggaagacgtggtgatcgatgaatccccagttgaaaaactccgtgaagatgaaaaggaacttgattctaaacgttccggatttgtcaaggaaaaatatttcagaggtattgttacggatctgctgaaagattccggcgttaaagcgagcatcgttaaacgttatattccttacttcaataaacagattgcgtactatctggatctgttgggtgctgattatcagttcactctggatgacgaatttaacgaatctattaaatcgctgggtcgtaatgattttagttacgcatcgttcagtcaaggcgaaagagcacgtattaaccttgctttattgttcacctggcgcgatgtaaccagtaaaatttctggtgttgatttatcccttctgatcctggatgaagtgtacgatggtgcaattgatcgtgatggtagttttgccgtaaaagcactattggatgggataaatggtaacgtaattgttatcagtcatcaggatctggatccgcaagatttcgatcgacatatcaccatgcagaaagttggacggttcacaaagtgtactatcaatgatcgaggtgcataatgttagaaagagaatttgaattagaaaccgctccggaaatagagcggttttatctccacaacaattttcttgaagaaaaacatatagttactatgaaagatgttgaggaagcattcaaaaataatcctatagagttgacgcgaatcaagaacaacaaaagttctgtttggttcctcgaaaaaatctattgaccgaaatccataaatacagtaaagtagcccatgtaacgaaacgtgggctttgtttttatttgaggaacaataaatgatcaccgaatccaaaatgacttatcaggaagcactgaaagttttgggcgcaactggtagcgaaaccagcgccgaaatgtccagactcttcaaacgtgcatccttacgcaatcaccccgaccgtggtggtagcaatgaattaatgcagaaaattaaccaggcttacgacgtcgttacaaaaactgggcctagtggcgcacgttctgagactgctggtgatgttcgcgcacgttatgcacgtcaaaagaaagaatgggaagaaaaagttgatgcttactttgtagtggcgaaaaactatttcagcaccaaatttaacgcacaggaatttgcggaatacttcaccaaatacactggattgcctaccactttcaaacaggaagtaacaaaaggtagtcacggtgtttatgcttcgttccgtttcacttctggtgatgcttactttgatttcggtttcaactgcacccctccgaatggacaagggttagccgctccggattcatctgcactgggtagcgtttctgttagtacctttgtactggttggaactaaaaaacataaaatggcaagccgtgattatcaatggggcaaaaacccagataagatcactccggaaagcctgttcccgtctaaaaaactggaaagcattttcagccctgtacagaaaaatatcaagtacaaacgtgctgattacctggcatcattccgtaagctgttaggcgctgacattagcggaaacgatatctttgttgaagttggtacactgaaagttcgtttctatcgtcacgtattcatgcgcaaaggtgcttatgtgtttagcgcggtgtatgatcctgctgtatctaagtatcgtccggctgcacaacttcgcggaaccatgttcgaagatgaggacggcgcttgcctggatatgatcgttgatacgttcaaagagttgcagaaactgaaaccgagtgttcaaggagttgtgaacgcgatcgataagatgaacgcagagtttgcggcgggacatcgttcagcatcttttgttaaacgtgtagctgctcaggaagccgcaccaaaaccagaagagaagccaaaacgcactgttaatcgtatcggtaaagaggaatacttcgcagcactaaaagatattggtgctcgtgtaatgcctaccagcggttatgttgaatttgataacggcgctggtgttactatcaacttcaagcgtattgttgtaaaccgtaaagcatactactcattcagtagctttaatttcacgtactctggtcagaaacacattgagtggttgaaaggaatcgatatcgcagaagataccaaaggcgcaagcattagcctgctcactgatactctgaaatctttacgcgggatctctgactggaacactgttaagagcgctttagatcaaatgaattctaacttcaaagcgggtaaattctccgcgcctcatgtgaagaaggaagcagagcaaaaagcacctaaacagaaagacgaaatcggcgcacagcctaccaaaccacaggcggctaagaaagatacaccggaagtggaaaaatcacaggctgttcatgcagcacgtgagaaagcgaatatgaacaacactattcgtaaaatgatgactatgttagtaaaagcacagcgcaaagacactccggaagatatcaagaaggaagttgatgcagcaattcaattgtggcgcttgacttactaatcaaatgaactataatgggaactgttaacgcagttccctttttatttgaggaaaatattatgagttgtccaacatggttacgtttggaaaatctgaaagaaggtacacaaaaacggatttatattaatcttggttgggttcctcctaccgattttcaaatggctgagattttaatcaatgctgttaaagaagtaagcgacacttacaaatgggaaaggctctattttcctttgattggtttgtatatgacgcgaaataaatttgaagaaatgaaacttgctgttattcgcgctacgattattaattcccaacaaagatttactttgaaaaatgcatggagttctgaatgattattcaagtatctgtacagggtgacactctgactgtcacacaatccatcaataccgctcttgctgtatgtcgcgaccatatctcacaaaatcctccagtgaccgagatcctggaaattgatgtttgggatcagattgggatgatcgacgcatcatatggatttaccccgcgagatgaagaactatctcgtatcgaatcatggctgaatgaacaggaaacggaatgaaactccctaagaacacaacactactaacccgcgaaaaacttcactctgttgattggtgtcctctggatatcatgatttttgatattgaatctcgcgtgatcaatgcaaaatatcaggggtgtagtattttctctgttgaattcgagaagattcgcgggtatgatgagaagtacaaagaaaaactgaaagttatgattgaagcattaggctatattgtaactgttgaagacaacaaaatgtggatcgcaatatgagcatagtaaaagcggtgtttgcattgggtattgatatctatcacgatgatttcgcttttggatatcagcaagggttgccgtggggccactgtaaagaagatttgcagaacttcaaagaagaaaccgcagatagcgttttgatcatgggtgcaaatacgtttacctctcttccgggtaaacttcctggtaggatccattgtgttctgtctggttcaggtagttttttgaaaaccaaaaaaggcgacgttgctgattacgtgatccacggtggcgggttgtctgctgctattggtacaatgcaagcaacacacccagataaaaatgtatgtgtcatcggtggtaaggggttgcttttagattcaatcaataataaaatggttgatgaagtaattttgacaaacatttacggacatcatgtgtataacgcaccagcgtttaaacgtgatgttgcatttactctttctgaactgggtggcgcattattaaaatatgaattttctgatttaaaaactcagtacataaaagaacatgaacgcattgaaaaaatcgtagttgaacgatataaaaaggtataaaatgaaacaatatctggatattattaaacttgtacttgataacggtgttgaatcaactgatcgcactggtgtaggtactattcgtattttcggcgcacaagcccgatgggatctaaacagaggtttccccgcaactacctgtaaaaaactattcttcaaaccgtgcaagcatgaattgcaatggttcctgtccggttcaaccaacgttgaagaacttcgccggatgacctggggtgaaaatagcgataagcgcacaatctgggatgataactatgaaaaacaagctattgatttaggatacgattctggttatctggggccaatctacggtcatcaatggcgttcatttggttctctttatggggatgatgatagttattatggcggtagtggtgttgatcagatcgcaaaagtcattgaacaactgaaatcaaccccagacgatcgcgggatcatcgtttctgcctggaaccctgttgatcttgatgatatggcgttgcgtccgtgtcactgtttcttccagttcgttgtaatcaacggtaaactgtctctacagtggtatcagcgttcagttgatgtcttcttagggttgccgttcaatatcgcctcctatgctctcctgacgcatattatcgctgatatttgcgggtacgaagtgggcgatctggtttggactggtggtgatgtccatatctataaaaatgcggttgaacaggcaaaagaacttttacagcctaaccgttcaccaatgccattaccgattctaaaaatgccgaaggtaaatagcttacttgatttagatcaagaattctttgactcgataaccttagaagggtatcataatcacggctctctaaaagctgaaatggcagtatgaaaaatggggcttcggcccctttcttaacaaggtaagagaatgaatgacattaaagtagtagtaaaatcctctggtgtacgccagccgtttgacaaagaaaaaatatacaaagtgctcaagtgggcctgtgatggtcataatatcgatgttcgtgcattccttgaaaatgtattagaactgatccgcgatggtatgactaccaaacaaattcaacgtatcgctatcaagtatgcagcagatcatatttctgttaaagaaccagattggcaatacgtagcatcgaatcttgaaatgtttgcattgcgtaaagacgtttacggtcagttcgatcctatcccgttctacgatcacatcgttaaaatggttgaagcgggtaaatacgataaagagatcctggaaaaatacagcaaacaagatattcaagttttcgaacgtgcaattgatcatgataaagattttgaattttcgtatgctggttcccaacagttaatcgggaaatatctggttcaggatcgcgatactggcgaaatctttgaaacccctcagtatgcgtttatgcttattgcgatgtgtctgcatcaggaagaaactgggttagcacaggttacgcatatcgttgatttttataacgcaatttccgatcgcaaactgtctctaccgactccaattatggcgggtgtacgtactcctacgcgccagttctccagttgtgtagtaattgaatcgggtgattctcttggttctcttaacgctgtaacctctgcgatcgtgaagtatatttcacaacgtgctggtattggggttaacgcgggacatattcgcgcaatgggttctaaaatccgtggtggtgaagctgttcatactggtgtgattcctttctggaaacatattcaaaccgctgttaaatcctgttcacagggtggcgttcgtggtggtgctgcaacactgtattatcctttctggcatctggaagttgaaaaccttctggtgttgaagaacaacaaaggcgtagaagaaaaccgcgttcgtcatcttgattatggtgtacagcttaaccagttgatgtataaacgcttaatgaatcgtgattacattacgctgtttagtccggatgttgctaacgatcgtctgtatgatctgttctatgaagctgatcagactgcatttgaagaactgtatgaaagcctggaaaaagatccaactgttcgtaagaaacgcatcaaagcggttgacctgttccaacttttagcacaggaacgcgcacagacaggacgcaaatacattttcaacactcatcacgtcaaccaacagggtagttttacggttcctgttcgtatgtctaacctgtgttgtgagattgcgatcccaacgtcgccgctggatgacgatgataaaatggctggtgaaatcggattgtgtacgctaatggctatcgttctggataacgctgatatcagcgaattcccgaaactcacgcgtattgcagtacgtgcgcttgataacctgctggattaccagaactaccctgtaaaagccgctctgaaagctaaacagcgccgttctctgggtgttggtatcaccaactatgcatcatggttagcgagcaactattgcgactactcagaagcgtatacagacaaagttcatgagctaatggaagcgtttcagtttaaccttctcgttgcttctatggaactggcgaaagaacgtggtgcatgtggattgtacaacgataccaaatacgctcgcgggttactgcctatcgattggtattgcaaaaccgttgatgaactggtagcacctgtttataattgcgattgggaatggttacgtagccagattaaaaaatacggcttgcgcaactctactctttctgctttaatgccttgtgaaagtagttcacaggttagtaactctaccaacggtatcgaacctccgcgcggtttagtgagcatcaaatcttcgaaagaaggacactataaccaggttgtgccgaaccaaaataaccagattgatttctatgatctgctctgggatatggctaaacgcggtaacaaagggtatctgtctcacgtagcagttatgcaaaaatttgtagaccagtctatttctgcaaacaccaactatgacccggcaacctatgaagacgggaaagttaaaacagaagacatcattgatgatctgctgtatgctaactactacggtgttaaaactctgtactatcataatacgcgtgatggtgctggtgatgaagatgaagccgccgacgattgcgcgggttgtaagatttgattaatgccccttcgggggctttttaaaggtaaaaacatgttaacagtaatgaatacaaacccagatcataaccacttagaacaacctatgttttttggtgaagatactggtgttgcacgttatgaatcgcagaaacacaaagttttcgaaagcctgacgcaaaaacagctttctttcttctggcgtccggaagaagtcgatctgtctactgaccgtatgcagtatgcaaaacttcctgaacatgaaaaaatcattttcgattctaacctacagtatcaaaccctgttagataccattcagggacgtgggcctaacctcgcatttttgccaattgcatccgatgtgagcatggaaacctggatcgaaacgtgggcgtttagtgaaaccatccacagccgtagttacacgcatattcaacgtaacttgcacattgatccttctgtacagttcgaccaaatccttcgcaatgaagcgattatgaaacgttctgcatcaatgacacggtattatgatactctgattgatgaatgtcataagctgaaaaccatcatgatgctacaggaacaggttagcggctataaaccaaatgatccggctgtcgtgtattataacgagcaatacactaaacaggccactaagtgcaaagaagcgctgtacctgtgtatgcacgctgtgaacgctctggaagcgatccgtttctatgtgtcgtttagtttcacctttaactttgctgaacagggcaagatggaaggcaacgctaaaattatgcgcctgattgcgcgtgatgaagcattgcatcagaaaggtactcagagtaaaatccgtttgtggcaaatgggtaaagatgatccagaaatggttgaaatctcccgtaggctgaaaaaagaagcaacggcgattttcctggaagtatatgaacaggaaaaagaatgggctgaacatttattctctgttggtgatgtagaaggtgtatcgctgaaaagcactatcgcttatattgaacaccttacagatcagcgtatgcgagcggtagggcttgattcgccattcaccccgatccctaacccgtatccgtggatgaataaatggctcaaaagtgataacgtacaggttgccccgcaagaggttgaagtaagttcttacctcgtcggaaacttgaatactgaaatcagtgatgaagcgtatgcaaaatgggccagcaaatacgcgtgattgtcgggtagtaaacaagtacaaaactgattgggatgtcgatattcaaagaggtacgaagttcggcaacccttatcacacaggaaccaggggagaaaacattttagcgtttatcccctggttccagaatcaggttcgtactggggcgatcacgattgaagaattgaaagaacttgatggaaagaggcttggttgtacctgtgcgcctcttccctgtcacggtgattacatcgcgcatgtggttaatgttttgtgtggtaagaaaagatcacttgactttttggatatataatgtatgaaatctgaattcaacttaacccttgataaatgtggtcgcatcgatcgaagttttgttaagtgtggtgaacttaggcattgtgtttattttattgcaattaacgatgaaatagtatatgttggtaagtgtagggatatgtggaagcgtttagacacatatcgcaatgcaaagtattggagagaagccaaccccagtaacatcttaaaaacgtgtcgattggaaatggctatcaaaaaacgaaaaactgtgaaacttatcgtgactactcacgatgaaaatacatatcatgattatgaaatcaacatgatacgaaaatacaaccctgaatggaataaacagcactatgacaaaggcacaaactaaaattatcaataccctttacaaacaactcatgcagttgtgtggtgaatccgaaacatttttcttcgttgatcaagtaaccgtgatgggtacacctgttcgaatctttaactatcgcatggcctcatatacagactggctaaagcctggtgctctggaatgtcgcggtatcatgtttgaaatggatggagatacccccgtatcaatcatcagccgccctatggagaagttttttaactatgccgaggtaaaggcatgggaagcgcttaacgagtctcctattgaattaggcgaagttttagacgtgatgattaaagaagatggttccttgatctcaactttcctggacggtggatttctggcggtcaagtctaaaggttcggttaaatcagaacaagctatggatgcgcacagcgtgttaatggcaaatcgtgaattgctgacccgcttaactgagatcgctaaagaaaactatacggtgaacatggaatacgtttccccgaaaaaccgtattgtcgttggttatgattctcctgatctgcgtattctgaacgttcgtcacaacatcacgggtgaatacatcccttatgatgaactctttgctgacgcgctgttacgtgcgtatctggttaagcgtgagaatatcgaagtactggatctggatgcattcgcaaaagaagcatatcagaatgaaggattcgaaggctatgttgttctgacaacgaaaggttttgtaaaaatcaaaacaaactggtatgtcaatctgcatcgcacaaaagatagcattaccaacaataaggatcttttcctaaatattgttgagaatacggtcgatgacctgaaacagttattcagttcggatctggtctctctgaaaaagattgacgatttcgaaaaacttttccttgatagtctcaatcgtttgagtgcaaaagcgttcaaagccattgaagataataaagggaaatcgcgtaaagattttgctatcagtctaagcgcggatttgtcaaacgacggtcggatcatcttcgggcctcttatgaagtacttcgaagaaaccgatccacaaaaactggtcgatcgcatcattgaaatgatggttaaaaattacgatcagttcattcctgaacaatataaatgaggttcataatgcctaagatatcatcttgggtatggcctgtaatcgtggggctatctttgatagcccttttttacattgcagtcgataccaaaatcgaaaacgcatcgttacgtaaggatatcaaatctttgcaagatgatgtgaagaaagtaaaagagacaaatacaagcaatactgttatctacgtggaacaaaaatccaaagatcagcagttagtcaaggatgcagggcgcaaacaccttttgtttgagaaacctggattgattgaaatcaaaatcaacaaatccttcgacgaatacatgcaggaatttgaaaaatgaaattagcaatgatagtattacttggtgtttttctcgttggttgtgctgaacagccacctgttaaggtacttcctacgttacccgcaaaggttaacccagtgaaggtaaaatggaaagtaattgcagacgttagagaaatcgacggtaaaaaataccttgtaatgccctatgacggaaatccttatgttgcattatcatatccagattcattgatttttcgtagctggatgaatgacgttaaaagacaaaaggatcaaaccgataatgttctgtgtacgttgggataccctgagaaatgcaaatcaaaataaccaaaacgttttttcgtgacataacagaaggaaaagtttatactgcgaaaaaggataaagaaggtctatggatagaaaacgattggaaccgtgatatgtggctcaatcttacgaatgagtataacaaagaactaattgaatatgagatagtgaaatgaatctgtttatgactattggcgttccgggtagtggaaaaactacctgggcgcatgagaaagcccgtgaattgggtaatactgttacgatctctcgcgatgatctgcgtagctctttgtataatgctggtaaaggtgctggcggatacaaatacaccaaagcgaaagaagaaatgattgcagaaatgcaggatcacgttgttatctccactctgaaagatggtaaaaacgtgatcatccacaacacgcatctgaaagaaagtgataaaaatcactggcgtgaaattgcattggaacacaaggcagattttcatattgaatattttgatgtgtccattgttgaattgcttcgccgtaaccacaaacgcggtcgtgatgcattacccgtttcgcgtgtttgggaaatgtttaaccagtatcgtaagatccgtgggttcgtaccagcaatggaaatcgtcaatacccacaatcagaagtgtgtgatctttgatgttgacggtacgctaacaaaagtagggcaacgtagcccgtatgactttaccaaagtgatcaatgatccgccaaacatcccgattcaacaactgtttcacctgtacaaaaatgcagggtataaatgcatcgttgtatctgggcgtgaaggtaatccgcaatgcgcacatgatacatgggttagcctgttaagttatggtgttgaaccggatgaaatttttatgcgtcaagaaggcgataccaggacagattttgaagtaaaagaagaaattttgtttgacaagattttagataagtattatcctgttattgcagtggacgatagagacactccggtcggaatgtggcgagcaaacgggattccgtgcttacaagtcgattatggtgatttctgattgacatataatgtgggtatgttaaagtacccacacaaaagaggattacattatgaacgttattcgtgaagataaaggcatcatggttgaacttggcgatcgcattcgcgtagaaaatctgggcgattttaatcaaaaagttcgtttgttgtgccaaaaaattgctaacaaaatccaggaacagagaaaagcaccaagcgggtttgaagttagcgccactccggtttctcagtactcgtacattgtgtatattcatgacgtggatactaacagcacccaatctttcgggctggtgttaaatcctattactggctacgttacatgggcggttgtattatgaacgtaaaaattattgatagagcgatgatcacggacgaatctgtatacccggatcctcgttattatggcggcgttttcggatacatcaaaggaactgatattgatgtagtaacaagtccgattgcagaatatgatatcaacaaaaatcagacagaagttcgcgttactacaatcaacggttcagaatatatcgttgaagcgactcctgattttatcaaacagctactaaaggtgatgaaagatgcttgatcatcctggctctatgagtatggtgctcctggaagcattaaaagcatatgatatcccttgtcatttcggtgaagtaactgttaatactatcattgacgaaatcgacaacccaaatactttcattgcttgtcttgttcgaaaatttacaagttgttttcgaccgagtccagaaaaagtagtaatcagttctgtttctgctcatcatcgagtgttagatgatggaaagattcaactttactggaaagttctttatcacgtggtgtatcatgaagattgatgatattatgtttatgcttagagcaataagcgcttctaagttctctcaatgtgtctctgttaatgtaggtgctgcattgagaaatggtaacgggcgtgtgtttgtaggcgcaaataatacggttgatcctagtcatcgttgtacagatcagtgcaatcacttattagatgataacgggaaactgagtgaagaaaagcgccctgaacattcacaatggtcagatcgcaacgaagtacacgcagaaatgcgcgttattatgctggcggcgtctcatgaacaaatcaaagacgcaactttgtatacaactcattccccttgctcacaatgtgcgaaaaatatcgaattttgtgttgcaacaggtatgattaagcgtgtagtatatctacataaatacgatcgtggtggcatcgagtggatatggcgtctacagcaatacggtgccgaagtagtacaacttgaccccgaagaaatgaataaacatttccggatcaaataaccaatgagtaaatgtatgtctgaactgagtgtaaaagcatcctttgaatatgttctgattgaaaccaacgctaaagcggctggaactgaaattgtatcaccttctggtattgtgactggtgttcgtcaacacggcgaggaaccgatctacggcacagtgttatcatgtgggccggatgtaccggaagaatataaaaccctgcttatgggtaagcgtgtaccgcttcctcatgcacaaatggcaaacgtgccggatcctgaactgattgcaggaaaggcaacaaaagaagaagctcgcaagtatccggttaaatatgtaaccgcacactataaagcgattcaagcaatttacgaataagagatccaacatggctaaacaaattcaagcaatcatcgccgataccgtcgcaaaatccaaaaaacttttcgacaaaggcgacatcctcgaagcaccgacccgcatcgatgtaatgacttcaatgatcattgatgctcaccagggaaaactgaattcccgtgcttcggaagtaatggaatacatcgtacagttcgaggatgtatgcaaatacgccaaagctgttgatccggctgttcgcgaaatctaccgcaaacagttctaaaaatatcggccccttagctcaataggtagagctaatcactcataatggttaggttcccggttcaagtcacgggaggggccaccaaacaaggcaaggcacttagagaagcgggaggaacagaatctgattctgttggttgtaggtgcaaatcctacccttgccaccaaattagggtgcgtagcgcaatgccgttaaatggttcggaatatgcaaccttatccacgggaaaggctctgttggtatccggtaataggttccccggaatgcggggtgaagtaaagaaacttccagcccactaatttaatgaggtttatatgaaatttcgtgaaactgtgaaataccataatgcggtcgaacatacgcagatttttgttgatatgtctcctgcaaaattcaaagaacgctatggtatgacatttaatgaatggaaagatggattgcccgatggggactaccgaaaaaacttcaaattcaatgaatgttatgtggatgatgatccttacgatctggatatttttggtaaaacaacgcctctcattgagaattcgccagaacagctttacgaatcttgtattgactctgcatacgaaatttaaagagataacatgaaaaatttacaaaaactgtttgaaatgtctccggcaattagaaaaatcatcggagaaaatagcaatccaacgaatcgcaataaaaaattgatggaactttttgcaaaagagttcgatgattttgattctgaacttcataaagcgcttgaggcatattctaaacaagggttctttgcatcgccgcaagtaaatagcaagaaagagtatagcgaacgattctttgattgggagattgtcaatctcgttcgtagaacaaatatatctcctagcaatcaccaattgatttctcttgatacttcggtattctttatccagtatcttatcagcggtggtttcaaaaatcctgaaattccgtttacaaatgaagcggttagcagtgaatttgatgaatcatttgtatacatcaacacaaacaaataatcaaatggctatcttcggatagccttatttttggggtgtctatgcgctttttaaagtatgcaagttggatcgtactcgtccctcttgacattattactggagtattagcaattctgtttgccccgtttgttgtaccgttctacaacgagaaaacagggcatcttcctaaaggcttccggtggatggaaaccttcgataatcctattgatggtgatggtggacatatccgccgttgggcgtccatacgctatcatctgggggcttttggggtatacatgcagcgtgttggctggttgtggagaaacaaggcttataacttcgcatatcacgttttaggacgtgaagcgacaagcaaattcaactggaaaggcaacccaaaaacagaaggtgggccaaaccccgtaaatcatggatatctgctcatgtggaacgaatcagcatggggtttgtacgtttacaaaccgtggctacggatccacaaagtgcaattctgtttgcgcgtttatgctggatggaaactgaaacaagaagttagcgacccagttaacctggatcgtgcaatgctggcgtttcatttcaacccgttcaggtattatgtaatcaagtaaaggtaatacaatgaaagcatttcaaattttagaaggtttgcatactggtacgatctatctggaagaaggtaacgacgttcggatcgtagtatcaaaaacattaactatggattctgtgatcggtaaagctcgcgttactccgtttgaaaagcgagagattgagatcgaatatcaaccaactgttaaggtggaaggtggacagcatttaaacgtaaacgtgttgcgccgcgaaactctcctggatgcggttgaacatcctgaaaaatacccacagttaacgatccgtgtttctggttatgcagtgcgttttaactcactgacccctgaacagcaacgcgacgttatcgcccgaacctttacagagagtctataatggcaatttctgatattacgggttataaaccccatactgataaaaaagtagaaacagtaaaccgtatcaaagatgctgaaaatgcattaggtgcaatcctggaagatatcgaacagcgcctatcaaattcagatattgattcgctgatagatgaagaattagatgaggtgcttgaacgtatccatcaaattcaactggcgaaagaccgactgaaagaagcctctatgtgggcgtgtcgtgcggtgtttcagcctgacgaaaagtattaaaaatcaagccgttgccgaaaggtagcggcttttcttttttggtgtaaaaagttgttgactcccttctcacattcccttatagttaatcccgtagacaagaaaacacttttatgaggatgacattatgaaacgctcttacaacatgaatgaactggttttcttcaaaactcgtcgtgaagcacgtgcttacgttctggcggctggtaaaaatacttctgctgctatcgatatgggtactgataaagctgttggtgctcgttgggccgctgttatcgttatcgctgctccggttactccggttaaaactctggtacttggtgcgcgtcacgccgaaactcttaacactgctgcaagcggtaggggccacgaagttaaagtgttcaagaagcgttcttatctttcatgtacaaggggttaactatgacacgattcatatataaagtggaatacgaaaatactgagttatctgatacctttttgaagatgattcgtgatcacgggcaacgtctggaaagagtaacgattgatactgcgtttgattgtcctgttgggttggttctaacattatcttgcagccccgcaaaagaatcagcccgtgtcgaaatgttacataaactaaatgcattttatgaaggtggtagtgtatggcgagtattgtaaaatttttcaccgactcagtgaaagaaattaaaagcgctctggaacaatggaacactcgttgtgatgtatccattaaatcagagtacgaaacaacttatgatcgttatgatccggcccgtggtttgcacaataacccccatgaggtggaagtgtgaaatactacggattcaaaacgagtcattttggtaaagcgtatcgtacagaaaacatcgatcgcaaacgtccgtactatgattctttagtacgcgcgggacgcaaacgcgctcgccaggaagggaagaaagaaggtgaagatcgtggataattggaaaacatgggtatcaattatcgttggtgttatcatcggtcgcggtttgtatgatttaatattttcggcgggggttcattatggacattggttcgggtagtcagtacccatcatgcgcgttaagcaacttcgctccgcatccgtttacgtttgacggggtagaatgtgcatcaatggagggctttttacaaagccttaaattcagcaacccagatatgcaagcccatgtatgtactctggtaggcaaggccgcaaagttcaaaggcaaaaagaaaaaatggtggactaaccagaccttatactggaaaggtatccctattcatcgttcctctgaggcgtatcaaatcctgattgaaaacgcatataatgcgttattccttaatgaagggtttcgccgtgcgctggcagcaaccggaaaaagtaccttgacacattcaatgggaaagaataagatgaatgaaacggtgctcactgaacgtgagtttgtccgaaatttaacccgattgagagatctgttatgagtgaaaaagaaagagtagaatgcgtgttcctgttcaaaggcgcgattaatccattagcgttaatgtatgcgcaacatgcattacgttcaacgttgattcagagtgttatctataaagcaggtgtgtattatgttaccatcggcgcaaataacatggttgttattgaatcctacgttaaggaatgtgcatcaaacggcgttgtctttgataaagtcgattttgatgctggggtagatgctgtttatatgtataagggttgatatgagttacgtagtttatttcgattgttcggatctcgatccgtttgttcttcaacaggcaaagaaatatcatcaggatgtcgttggcattggtgtaacaaatgatgatatgttgtgcatcgaatttgaatattatcggacatttgagcgtgattatttcctgggtgaattgaacgcattcaaaagtacccttttctttgatcgttatgaggttatatcttgaaacctgttattcttaccgatattgacgggatcgccgtaaaatggcaaagcggcctcccgttctttttgtctaagcacaacatgcctactgatattgcattagaaatggttacggatgaaaaatttcgtgatatgactgaaatcttcggatgtgatcagcagttggctaaaatccttatggaagaatacaataacagttctttcattcgttatctgaacgcgtatgatgatgcattgattgtgatcaaccgtctgaaaacgcaatatgatttcgttgccgttaccgctctgggaacaacaccaacagcaagccttaaccgaattgctaacctgaatactctttttccttctgcgtttaaagaggtgatggtcgtgggccacggtgaaacaaaaactcatcgttacctggaagcgaaagcaaagtatggtaatcgtctggtttgctttgtcgatgatctcgcgataaacttaaacgaatgtcataacgtcattagtcagttgccgttattccatatgttacgtggtgaacgtgaagaaacaaatgcacctcaccagttagtaaaatcgtggtttgaaattgaagagaaactaaatgatcttgtcaatccttaatgaacttgcttctactctgaaaactaaagagaaagaagcaattttaaaacgtaatgcagataatgaattgttgaaagaagttttccgcattacgtatacaaaacaaattatgttttatgtgcgccagttccctttagtagaagggaaaccaggaacaacaccgctttccgatgcaatcaaagcattgctagaagatttagcaagccggaaatatacaggcaatgcagcgcgtgatcgtttactggatattgtatcatcagtgaacattaacgatcgtgaagtgctacgccgtatcattaaccgcgatctggaatgtggtgctggtacaaccttaccaaacagggtatggaagaaactcattcctgaacagcctcaatgcctcgctacgccgtttagtgaaaaggctttacgtcgcatcattttccctgcttactcgcagcttaaagccgatggtgcgcgttgtatggctgatttgctggaagcattaaaccgtaaggtatcgagagcgggtaacgagtacgaagggttaactcagcttgatatcgatctgaaaaagattcgcgattatctgggatatgatgtagttctggatggagaattgatttatgttccttccggaaccgtaccaacattacctgaacctgaaacagacatgcctttttctttatctgctttcatggacgatgatgataacgacattgcgttatttgcggaagaagttcgcaaagtatcgaccccagaagaagaacaggccgaagcaaaacgcgaagaagggaacgggatcgtaaacaaatctctgaaagggacgatcaccgaagaagaacagcgaaacattgtttatgttgtttgggatattattccatatgaggtgtattacggcgaagctgaaagtgttcagacttatgatgagcggtttagcctgttgcgtgatatcctcctggatctttctcttccttctgttcgtttgattcagtctaagctggttaataacattgcagaagcgaagcaggactataacaattaccgcaatgacggtaaagaaggttctattctcaaaaacagaaacttcaaatggaaagattcgcgagtagccgatcaggttaagctgaaaaacaaaaccccgattgaactacggatcattgatatctacgcgcacactaaagaagaccataaggtcggcgggtttgtggtggaagatttatccggaatggctcgaacgaataccggatctgggttaactgataccgattatcgttacgatgatgatggtattacccgtgtatacattccattagatgaacgtggtgaactggatcgcgaatacatcatggcgcataaagatgaatacattggggccattgtagaaatggaagttgacggcctccagaagtcgaaaacgcgtaagaaaggggaaccggaatacagtttcttccttcctattatcaagaagataagacgcgataagaccgaaccagacgatattcatgttgtctttgcagatctattttaataaaaagcccttgactccggtcgggggctttgttatattgggcctatcgaaacgtaaatcactaagagaatatattatgactagtagttatcagaaacacaaaacccttatggcaaacctgtccggtaaacatatcgacgaagtaaaatctctgctgacagtgaccgaaggttcccgattcgaaacaaatcacattatcaaaccttctgtgaagaaagtactgaaagtgatttaccgacatccggtgtatcagtgcgttcatatcatgaacagtaacgcatttattttcgtatataacgaatccgatgataagtgtgttggtattttccgaaaacctaactttgaatgcatgagcgaagcggctgttgcaaccccgatcgttgaagaatatccggattatgttcaacgcaacatgcgttatgtgcaatcccgacttgattatgcatacgatttcaattctgacgcggtagaagcgctggcggatatcctttgcaaaaaccagaaagatcgtcaaatgacaaaatatctgactgatccaacaccgccaacaattcgaatttctgttgaagttccgtttgaaaatcatttcatggcagttgaagcgcttgctaaacttggtttagaagtgaaaacagaagccgtttaatagcactttttgttaaagaagcctcttgcaatgcagggggcttttttgtatagtgtgttcattgaaacgaaacacggagataaacaaaatggctcacatgatgaagaaagcagaattccttaacctggttaaagattgcggattcgctcacttgaaaacttttcgtggtagtgtttacctctatgaccgcgaaatccaggttgccgaagtctattgcgcttctaacatgcaagaatctggcattatctctgcaatgaaccaatcaatcaaataccgtaaatggatgggctgattatgaaagttaacgtttcttatgaatctcgcgttaatggcgcacagtggcggaagctggataacggacaagtggaaaggcgcttacctggttccgatgagtggacacttgcggcagtgttggaaaccgaaatcgatctggcaacaaaagacggtattttgtttgaggtgaagaaatgatcacactcagtgattatcttctgtttactgctctttgggcggcttcgatattcataactgctttgatttacaataaacgtgatgattttgggttgtgggtattcattcacgggtttcctctgtctatgtggatcgtgatgactgctgaaattctccattaatagcactttttgctaaaactatcttgttcttgtttggtatattgtgttcatcgaaacgaaacagacaaaaggaacatcacatgaacttcatcgatatcaacaaagatttagaaggtaaaaacatcaaactcgttaaccgtgaaatgttagagagtcttggtaatggcggcgaaaaattcagtgaagaattctataacaatttatcgttgatgactgttaaacgcgttgatgttcagggtggttctggttgggtttctgcaattccggtttccctggtagatcaagcaacatatgacccagttgccgattcatgggatctagaaatgccgttggtattcgaagaagtcatgaagtgctacgaaatcgcataagggtattattatgaatagcggaaaattacaaatgaaagttagcgaagaagaagttaaagagcggttatcggtagcaagaagattccttgaatctatcgaccctgataaacttggaaaatgccctgatacgatttgccttaattgtgggcgttctgttcttgttggtaagtgttgcgataatccaaatatagttgtgatggaaaaggaacaagtatcccccgaaacatgggatcagatccaggaaatcattaaaaaccctccagcgccaaccaagaaattacgtgaattgatgacaaggaaaatgaaatatgagcaaatttaaattgagtgcaaccgttcgccttattcgttggaatggtgaagagatccgttatgatgaccctgaattcgcccatgaaattctttcacatcgtctgggattgaaaaacgcgtcattggttcaaactgttaaaacatcagcagagccggaaatttggcgttgtgttatcctggatctcgataacaacattgactatgatgatcctaagaactatcctcttctggaagcacaagttgagaatgctccagaagacagacagtgttttttggttgagttaccacgcgaacattacgaaaacatcataaaggcccgtaaaaaggtcaataacaatgttttcgatctccacctcggattgtttgaggattaagtactgctagttgtgttcgtagtagcggcgctggtaggttcccccacctgtatacattcaagtgtttgcaggtggaaatcttttgatacgtctcgaacacattcaacgatcagatattttcctgcatactcttccccaaatacctcaatgattgcccctaccttaacatctaaacgaccctgctttatatcgaatcggatccggcgttcatagctggataacaattgcattttagacgcctggaaaggtttaccttctgaatctgggttctgaaagttggtatcatagattgcattacggtttgtgaagatccatgtattttctgtgtctgtatcagccagtatgtcaccgtacatctttttatcagtcaatgacagactaaagaaactggcatctttaaacagcgttgtgttatccttatgggtaatatactgggcttctgtgaatatgacagtatcaccaacaaacacgttatcaacgttaaatttgtatgctgggatcggtgtctgggccagaatgtcagttgaacttttaaggaaaataccggaaccatcttcccacagataacagaagtcagaagaaactacactttgcccgttgtccctgatataatcaaatatatcctgatatgtaccatttagacatccaggagggatacgtatgttaccgccgtcaacttcgggggtaagtagtttcattttgctatacagtgccgtcatacactctgtaatcgtctgtacggcgttgttactaaatgaacgggcaaacttacgtctgaacgttttatgcagcggagagaggttcatacgcagcacagaacggttcttatcgtcagtatctacgttagagtaaagcaatccgtaataatgttgttcctgtgtaccgttgtactggaaagatacctgtatgatcggctggataagttgctgatagattaactgtgcgtcgtatatctgcatcagcgtttccgatgagccgttaatcatcgtcttttcactaaacgagacaagagcgggtagcaattcagtatatgcgttatcaatgtatttttcgtatgatgtatataatttaatcgatgtgactcgattgacgattttttcagccataaaaatccctcctaatatatcctatttactaaatagtaaataatgacccaggttcaatttgaggcaataatgaaaaataaaactcttgataaatttataactacacggcttgaaatcaagaagactaacgttaaaaccgttcatcttccggatggaacagccattgagatccctaagatgtcgtatcgtcattttgtaaagattaagactctgaaagatgacccagttgcgatcatgcgattcatcattgatgacatcaaaccgcgtgaactaacagcagcggaaattgaatttgtgttgatccatatgtatgcacacaataacgctgattatgccaatacgcttaaagaaattgggctaaatcttgatgacctcaaaatctccgaaccttgctatgattttacgtttgacaatgtgcggttagtctttgacaaacccagcctgttaaatgctcaccttccgttcctcatcaaagaggcatatgttgacggtaagccagtagaattaactgaggataaacgagacgaattaattaattgcctgtaccgattcgaatatgatcaggtatcgcgtggtgtcctccaggaagtatacattattcatgaggggaaaaccatcaaagggcttaacatcattggtgaatgataatggctaactcttatttcaacgaagaacaaaagaaaaagtttctgaacagaaacagcaacaaacaaccagcggtcaccaaagtaacagcctcccttgatgctgaaagcgcccgtgacctaaaggaaatcaacgataacacccttgaaagtgcaatcaatactcttgatatcaaagaagggttgaaatcgttcgaagaaaaattccgtgacaaattcgcggggttcaaagaacaatacgaagaggataaaaaggaatcattagccgaacaactacctgatttcgtcggcccgatccgtcctatatccttaaccgatgataactcaaaaactgttgacaatacagtaaacgttaaccaaaatggtcagttcggtaaactggaagaaaacaccgaatctatttttcatgctattaacaaacttgttgatttatatgaaaatactgataagcataagccgcttcctgaaccagtggaagaacctgatccgtatgtagacactaagaaaaaacgcatcaatgatgatgatgacaaaagaagcaaaactctggatagtattgctaaaagtctggtttctattaaaggttttacatcgcagatccttagccgtttcattggttactctctggaagcaatggcaaagtttgctaaatggacgctccttattggttcgttaatctttacattcgatgtgttgcgcgtcacaatacgcaaatggttcgaagatatcctgaaagaaggggaatcctcaaagaaactatttggtacatatctgggtaacgtaaaggctatcgtaacaaagatcgaagaaggtttgaacaacttcaatatgaacaacttaggcgaatcacttcgtgatttgttcgttgagcctatgaagttgttggggcaaactgtacaaacggcaatcactgagggtatcggtcgtcttattcaatcattgggtgaatcaactggcatagacagcattaccaatgccggacgcggaatgcagatcaccgctttacgtgataaacagaaatttggtcttgaattgactaaagaagatattcttatgatcaagaaacaggaactagaagaccaaaaagcggcattagaaaaagaagataaagctattgcagcacgtcatgcattaacaataactccttctcaaattcctaatggttctatctataaagttgctcctactgattatcaagaaagaaatcagaaaaccgtagatgctgataaagaacggcttgataatatgaagaaagcaacggaagaaatgcagaaacaatacgatttagctaaaagcagcgaagaggaagcacaaaaattagccgatgaggaaaacaaacgcaaccgcgcacgtatagaagaagcaaaaaggttagaacaagcgaggaaggaaggaaaacagccgccagaaggtgaagagaaaaagggtgatgatctgttgggtaaagcaaccaactatgctaactctgaaaatctggatgcagccgatatcaaatacattaacgatgaactgttggatcagcttgaaaaacgtcgtaatgaaggcaatctggacgatgtacagaaggatagaatctctgaccttatcgagcaattgcaaaacaagattgcagcccgtacagaatccagcgccccgatcgacgcacagccaccgttagcagcaaataaaccggatgctgataaagcaagcaacattcaggttaacaacaaaactgttaacaacaacgtaactcattcagtacaacgcacagagcataaaccgctcgtagcgctggcataaggaacatataatgaagttttctattattgatgacagtataaacactctcaaaaatattaaaaatcgcggtatcccctctgggggtgccgcaatcacagaatcagtattaaagcaaactatcgttaccgccgaatttccggcccaacgtgcagcaggtatcgataacgcttataatgcttcgagtctgtataataacggccttctgttcactgcatatgattttaatggtgttggtagtaaagacaactatcgttcattacgtcaggcagcacagaacccaaaacaaatactatcatctgcgacgggtaatgttaagtacaaacaagtgttgaatagttctattggtactatggaacctgtttgccagatcctgctaccgcgaagcctgaacgataacgaagtaaacagccaccgctatcaagatgcaaacgatagtttcttaaccaaagggttgagccgtgttgtttcaaacatggtatggggcgctgtagaatccgtttcaggcggtattatggcagaccgaagagaagcccttgatgttggtactaaagccgctttccagggttctgacaagcgaacaaagatgtattacaatacattcgtgattgaaagccgtaatgatttgctggaactgattaaaatctactatctgtttactgttctgggatatggcacaacttctggcggtactgctaaagaggttgctgcattggttaaacagtattacggtgttctgggtgctaaaaccgctaacgcaattagcccttccagtaacccagtaacagcgtcagattttgataatagtctgggtaatgacgtggttgatttcatttcaaacgtagaggttattaaatcgcctcctgtctggtttattcgtgatttccagtctggggattccttgcgtttacctcattcaacctttgggccagcaggtattaccagtgttcgctttggtcgttctattgataatattgtaaatacattaagagaatcaccaaataccccgatctcacttgaggtcgaaattcaatttatggaactgatcgatatgcgtcaggattctatttttgatacaaattactaaggagatatgatgttttacaacgtagatgaatttttatcaggtatggctaatcgcgattttcagcgtagcaacctgtttagcgttgtatttgcaaccagccctgcatcacgtatccttgacaacacgatcggtagtattcgagatactttgattgatggatctattagttctatcaacgcaaacaacccgaacgaattcattaatgctatcactggcggtgtgagtaaattgtttagttacaccgtcgataaggcgattatgtcgctgaacaaaacaggatttagcaaaatcatcggggcaattagcccccgcttgattacttccctgtttggtgatagcatgtatggacagttgttagctgaattccgtgataaaatgatgtataatatgggtttaagcatcatgggagttaacctccccggtaaatccattgggtacgaatacgtttataatggtggcgtacctcaaatcagattcactcgccctgagaatggggaattgtcgctgacgttccgaaccgattcagaagcccgtaacctgaaaatctttaacgaatggatttccgctattcgcgatgatgtaacaggacaatacgccttcattgatgaagtgacaagtactattcaggttaacttacacgatcgtgatggttcaccgcatacaacatacgtatttcagaagtgcttgcccgtcaaaatcagtaacagtgaattgagctatgagaacaacaacgaaatctggacatttactgttgattttgcctataaaacatcatgggttgtcgaggctgataaagaaggctgggaagggttcaaacaatccgtagaggaaggtttagccattgcagcacgtaccgcaattacaggacaataaaggggctacggccccttttgaggatcttatgtttgatattattcgagtaacattaccatcagggatcaaacgattccctatgtttacagttaaagaccagtttaaattaatgctgacccgtattgatatggaaggtcggccccttaaagagcaacaggaaatactggatgaagtgttggatctgctttaccctgggtattccaaaacagaacaggaatacattttcagccgggtgtattgtggttcgttcggtaaaaacgttatcaaggttgtgataggtggtaaaggtgggggccactccgaagccttcatggtgattaatgatattcaactggaaaatgaatacaagctgaatgatgaaatcacattagggtttaacttcccccgtacacgcaatacaagcgaagagttgtttcttgaatgtattagttatgtaatatacaacgaacagcgctatgaatggacatcactaaccgaagaaacgaaagaaaatattcttgatatcgtcgaacttgatgatgtcgaaaaaatcgttactatgctaacgaaatcggttgatgtgtctatgcgcggtaaatcatttagtggtatgttaaccctgttcaagatcctgtttagtcgtggggatctggatgaatttgtgaagaccaactatctgctaaataaaaacggcctgaacttggaacctatcatgaatagtagcccaatggaaaggcaaatttatactgcattgcttgcagaagacttgaaaaaacaaggtgctgttaaatgagaaagcatgaatataaacacgttgagaaatataatgttgattatcgtcctctgacacatacagagtttacccccaatgcagattttatcaaaggggatgtttacctgtatcaaagagaatatcttttcattctggcacttttggaaagtaaaaatatcgatacccgtcaactgttcatcaactgtgaagaatgtcaggaaagaatagaattccagcttaaacgcaatcaaataatggttgaagatttcgacgataagctatacggcaatgacggaatcgcgctatctgttcaccctcgtaagactggtgatgaagagatccccgatcttatcgattacgtaatgatagacggcgaacagatcatgtggagtgattgtagcgacaaagataaagaaatggtgttggatgcaatcgactatgcaacctataaatcgatttctaccgccctggataagccagcagtggtcgcaaacattccggtaaggtgttcgtgtggacatagccatatcgtctctctgagaggcttacagcaatttttaaaggtggtctaaatgggtgtaaatctgaggttgctatatagcgatatagaacctaacatgcaacgagattggaataatgacgtagcggcttcaaaaggggccgcagcagtaagaaatagtttgattggtatcgtaaccacgatcaagggtacacgtccatttgatagtaactttggttgtgcaattagtgatatgctgtttgagaacatgaaccctctgacagcggaatcaattagaacttctatcgtatctgcgatccggacatatgagcctagagtatataatctttctgttgaagttattccacagtatgatgataactcagtaacagtaaccatctattacagcatcattgatgacccggatgacgtagagcaaatcaaactacagctttccgcatcataacaaaaagccccttcctttcggttggggctttctcttagaattcaatgaatcccattagtgtttgatatcgcaattcaaacggggagatataactttgcatctggttttgatcggatacgatgtaataatacacctcatcattatcatcgtatagtgcttctttgatgatgcaatatcgatcggtttccacgttcacataaagagtatccatgtactttgtaactttggaaccctgtgaactgatctcgtgaatagcgttatctatgaacagtgacaatgcttgcatgaagttatcaaactcaccatattcacagcccataatagaaattgcagtgtattggtgccagcctttgattgtatctccacggcggatccatccgatttgtctacccccgatagatacacaccacactttaccaatagggctatagaaccgcacaacttcttttaataacagggacatgaccccgcattttgtataaggattcattttaacctcatttcatatcaagtagccatgaagggctagtttcaagagaaatcgcagtatattcgtattttacagtataacctttgaaaccgaaaggaataattgcattttcattgagatatttgactttgtgctttgcttcttcttcattcagagcagcacagactgttgtttgttcaacgttaccagcaggagaagtaaatttttcaatgataacatatacgcagttcatcctattgtcctctttccattttttcaagtttcatcgtatccacttgcagttgaagtttaagaatacaacctttcgatatgttatacaagtagtcactaacgatttttgactttacctgatcgtaatcagaagataacgtaatccaatcatacatcgtttggtatgatggaagatacgtacattgttcttcttttgataacgctttaaatgattggtaatcggttggaggttccgaagcaattgcggttgtggtcataagactaagtgcaagtagtagatatttcataatgtattcctcattgttttcgatagaaccaatatagcaaaagcccccgaccgaagtcaagggctttttaatcaatgcaagaaagatttcacgtactgttcgatcttttcacgacatgtatcaactgaggtgctttccgcaattacggcatgacataacgcctcgcctccgacccagaaactcatcatgtactgaatatcacgaccttccatttctttttgatgcgctttgattcgatcgaaagcgttttcgattgtttcagtagcagtaagcatttcggattccccgtcaacctccgccagttccccatcgatcatttcgctttcgacttcttcccagtatactatcgttatcatgcattaccccagtggttaaccgtcgtaatccccgccacaattcacatcgccttcaatgaacagttcgcggttatcacgtaataaattatactttctttcgagttcaggcccgaacgcgtcggcgtcttcataccagctataattgtatcttccgcattcatcatcatattctggttcatcgccgcgttcattgaagtgaacaattttaatatcgtccatccccagttctttcagcttatcccagatatacgaaatctcaacgctatgggaaccgaacgcttccagtgagatcgtaccgtcgctatcgacttgaggaacaccccacttcgaacgagtatcatcggtgatcatatctattaatgactcaatattattctcaccgtagatatcagcaacttccttttctttaccatggcgaacaagtccgatcccgataataaagctactgcttgagctattgctcacaaacccagaacgaattttcatcgcatcaccatattaccaatcatgaatagagggattagcgcgaagacgataccccatagaatgaccttatcttcacgacggtcacacccataatagataacacctccagcgaaaatcaatacaacaactgaaacgaacgcgaataaataaatcatttgcaggtatccattctcatagaaacttctttcaggatcttattcagatcgtgaagcgcatcttttacgttaccttcgttataggtaagcatatcctggtacagccctttcaagcaacgattgattacatatgctttttcagaaggtaacattgtaccagagcgattataatctctgaaaatgtccatcatcgtgccgttgttaccaggtaatgacgggttgaagttaaccataccggacatcaaactatcaacatacacaactgttgtgttatcagaacgatacgcgccaccaactttaaaccagttgctgaacacatacggagattcccgcacttcgctcaaatcggttccgatttcatcgatgtttacacgaatgttgttaaaatacaccgattcatcaatagaaccaggacgccatacgatagcaccgttgttatttttgaatccgactacatcaacctgccagccgttatctgttaaccggacatcatcaacgacgatgaaatcaggtagctgtgaatgaaagccgatgttttcaggacgggaattacgaaacccatcacgattggagaaataaaggatgtcaccttgattcagttcacatatattcataagatttttaaagtccaattcaagtaattccacaagtcacctcaaagccccctttcgggggcgagatctcattagagtttaacttctttttcttccagaacgattgtgcaatcaaatttcacatctttccagaattccgctgcaacgatatctgttgcggtaacgcttacgctggtttcttcgaaatccagatccgcaaaccaggcgtgtccgacgacaataccgtacattacacgactcaggcgattattaagggcgcgaacctctttaatagtttcctttgtctgcttatcaagatactcgatcaggtcattcttgtcaagcgcttcgatctctttagatacggtatcgtaagcccacagaatgatcaggtcgccattgttgagtttcttcttaccttcggcgcgttttgcaacggtagccgcaacagccggaagtgatgaaacgcctttgattttcacgttcagttctttcgacatgtaaacatcagtcgattctgtgcgctcaaccttcggagagaagccgtaatcacggatcccttgctcagacaaccattcaccagccgcctcaccaaagcgctgtttaagcccttctgcgttgcgtaaaccaatcgcgttatcacggaagaacttcattaccttctgacggcctttcaggatttccagacggacgttatcagcaacaaattccttaccagaaataccgcgagtcatcgaacggttaaccagaggcagagaggtaaagtcaaccagtacagacatacggtcttcaccaattttagccagcggtttgatagtcagaccagaagcacgtaagtttttcagagtcggaatatcggtttccagcggaagtaccttaacgttcacgataccatctttaacaatggtaaagttacgcacttgtttggtttctactttttccggcaatccaaactctttttgtttgctttccggaatggttacataaccttgcagatccgtattgatggaaatgttcggacgggaactgttacccaccaggtgtttcactgcaactttcgttgtggtttgggtaaattccggtttccatacttcatgcgctaccagttgcgccgccagtgctttacgttcttccggagtagaagcgtttgcaatctgttctgacagtttatccagagtatcatcatctttctggacagtctgacggcctgtacgattgtacgcccagtgttcagaagacaggtcgatcacggtgtcggtttctgccaacagttcgagagcatcaaccaaagtaaacgcgttttcatcaggaaccatgttgtaatcaacaccatccatcagacgtttagccggatcaacaaccgcttcggagatcatatctttagcgttggaataatcctgtttggtaaagcagttatcgtatgctttaatcagacgcacatcacccagctttttcagaactttccatgccagatctggattcatggtatgaagcgcatgatacagaaccacatacagaacctgttcaccttctgctgttgccggatcgaagccgtcaacgtcattgatcgcgttttcacccagcgcccaaatgtttttgatatgttccggaaccagaacaacaccatttgcagcattcaggacatacacacggccttcatccaggtagatcgcatgggttgcatcgccaactttgacttcaacacgtgcggaggtttgcgcggtaatgatttcatcaaatgcaggtacatacgcatcaaacccttcaacgaatttgtgtaatgcgttggttgcttccgccattttttccagcagaggacggtttacataataaccatattccaggaaagcaatgttgttaaacgtcaacggcagagtagaacatgctttcaggatgtcatcagtacgccagcagttatcataaccatcagtcaggaagatcagactgttcagattgccattatccgcttgcagatcggtagcgacttcaaccgccagttgcagaggttcaacgaagccagtacatccggtcggacgcagataacgatcgatagcatcattgattttgctcaggtcggatacagagctaaccttttcgcccacgaatacagaaccgaactgaccacggctggagaaatacagaatagatacggtatcatcctgcttaaccagcgttgccaggttgtttttcaggtgctgacgaatgcgcgggagttcgttatacatcgatccggatacgtcacaaacaaaaacgtggttagtcggggttggtttggctacggcgtttttgaattcaatgttagtgatcataattttctcatttataggtaaatttgattaaaatttcgtttacttttttgctaatagtatctaatgcatcatcgcatccaaacttactactcaacaatgaaacaaaatcatccatcgttgttgtttgagactcgccaacgtcaaaagacagagcgtaggcaacaggatttttaatccttacgatttgaatagtatactcattcagatcgaaccgttcaagatattttcgcaaagaaaataaatcaatcggtactggtagagtttgactaaacgttatttcttcccccagttgataggggggcatttttacacagatttcgtattccatcagtgatgactcttcatagtgtgttccagattacggaaaatttgcccgtgttcaagctgtgattggaattctccgcattcatcagagtaagtaaattcataaatgaatacaccgttctgattgccaaatttagcgttgtactcttcatacaaccacatcttgatcagagcgtctttctcttctgtttccagatcataccagtcacgcccatcataagcaagcgcaatttgaggattagaccgatatcgagtttctgcgctatcttcggtttcccattcataacgcttatcatcatagtatgattcgaaaccatcacccatatgaccacccaggtcgcggtgtacttgctgtacaacttcttccgctgtcgggcaagtcatccagctataaccacagttaggaacacaatcacccatcatttcgcggagattgttgatatcagtcggatccttcgggaaccgtacaataaagctacttgatgaactattgctcacaaaaccagaacggattttcatttgatttcctcaaattcaaaagcggtgaaatgttttctttcgtcatacccaacagtacaacgatgcgtttgctttccggtaaacccgtcaaacacagttacacaatagtaatgcaacgacggaagcggtgtatgtttaatgtatttgatcgcgacgttcaggtcaacagtagaacatacacaatcagacgtttgctcaaaacggtcatcaaaaatcaactcaatgctatagatgttcatctttcacttccttcatgtttttcataacctcttcaaaagttacggggatttcgttgtactgtagtgattcatcatcccatacatcgcgatgcccgaatgttgaactttttgcaatgattttttcattttcccatacatcaatagtaacatgatcaccaagataagggaaattaggaactttgttcagcgcatcaacacagttttgcaatgattcagaaacatgaacaatttcagtgaattcataatcagcactataataagctacgtaaatcatcaccaccccctaacgatgctaatcaacagtaaccccaggatccagaacacagcaaccgcacaaatacgggccattactacatttccgcgactagtccactccgcactaaggaacaagagaacaaacgttaacgcgtataaaaccatttcaataacttcggtaatcatataaacctcacgaaaaagcccctttcggggcttgtttaattaatgcccgaacacaccacgaatagactctgcgaatgcatacagttcaggatttttagctttcactgtttcgatttgctccagaatgtaatctggtttatatttcgcaccgaaccagcagtaagagaaagagcgatcccacatgaacacgttatagtattcaccgttgcgaacttcaaccatcacataaccaggattagaacccagcgggtaatctttcagaagattgaatttcgcgccagcaccagtacatccgttaaacaggtcattaaaagtcatggtatgttccttttgtcagtttcgtttcaacaaggtcactatactattcttcgttagcctatgcaagatttaatttagcaaattcgccaaaatgttttatcgcttcctggtcgtatgcttttgcagcctctaattcatcactataagaaccgatatgcttaaccttaccatcaaccattatctgtgcaatgtaacgtattccggttggttgattgcgtacacatacacccttgaatatgctggttccttcctttcgccgtttcctgttctgagagttgcgggattggttcgcttcgcgcaagttatcaatcccgtcaccagcctcaacaccatttttgtgatcaatcacatcaggtagttttccggtcgcaacgtagtagatgattcgatggcgtagataccctttgcttttgaaataaacgcgggtatatcctcctttgatcttcgaaccaacttcctttccgatcaagtcggaacgtttatgcgatgttcgtataatctttcctgtgtggacatcaacagaaacagttttgaggaattcatcaattcctctctgttcttcttcaattgttcttaatccattatgtgacataacgccttcttaatttgttttgctatggcttcaatcactgggatggaaactgaattcccagcctgtttgtaagcctgtattttgctttcagggatgataaacgaatccggaaatccttgtaacctaaaacattctcgcgggcttaatcttctagggttcttaccttcctgcaataccagacattgaacaccgtcctttccatattgggctgttatcgtcccagtacacacagaatccaccataacggcctgataaccaaaccccttgccgtttgccttgtttcgttctttacgctctctaaagcccttccaggcacgatctgatatggtgtattgatcattatccggttcgagaatgtcacctacccttgttggggtacgtggaggaacaggaaaactaaagaacaccggatcgcgaaagcagacaataaacacacgctctcttcgttgaggcaatccaaagtcttttgtattcattacctgataatggatatcgtatccttcgtcctgtaacagcctgtagatggttttaaacgtgtttcccttgtcatgggttaatagctggggaacattctcaaagaacagcacagagggctttttagcccgtataatgcggagtatttcaaagatgatagtaccgcgaggatctaacatgccctgttttaaccctgctttactgaacgcctgacaaggaaatcccgccaacaggatatcgtgatcgggtacatcgttttcatcaatggcgaatatatcaccctgaatattttcatcaccccagttatcagcatatgtttgttgtgcatgtttatcgatttcagacgttaaaaggcattcgaccccgccgaatgccttatcgaaaccgagcctcacgccaccaacaccagcgcaaaggtcaattattttcatacgtcgaaatcaacctcatcgattttgtatgattcttcgccaatatcagcccatagctgaatattcacgctttttgcatcacgataaagagattgaccacaaagtccacctgtataacaagtttctgtaatctcgttaacttccaggcggaggctattgcgcataattttaacaacagccttttccattgccgaatctagggttttagtatcacccaatactacatctttaacgttcaaaataacatcacccattatcgccactccgtttcaattccgtgtttgtatgcgtcaacgcccaaaggcgtgatcactaaacacatatcagtatttttcgttggtgaactaaacgccatagatgcataacctttttgaatcagggcatcacgccccgatttactgggaacatcgttgaaatctaaatccaacatttttgacgagtatctgtaaagtttacacagaacatcaatttcagcgccggataatttcggatatgtcatttgtagtacctcacaacatgttcataatatacacgttcaatgaaatcattccagaaatcgcgatcaacttctttcggataaccagatacagccgccagcttttcaacttcacacatcgttgattctagcgcctcttgtacggttgcgaaaggaacaccgccagctttaaccattttcaaaaatgcgctgtccggaagaggatacacaatatcaccttctttgaaaatctggatcaattgcataccaccgcgcaacgcatgagaaagagctttccagtcgatcccgttgttggcttctgcttgccgtgcgcgttccccgtattcatcccagagtttatacacggatttcttcatttccgctacggtgatcgtagactggaatttacgccccagaacttcataaaattcctgacaacctgatttcagtgttttgtctgtaacgaatcgacaaaactcattggtcgggaatcggttagaaatctcaccaactttgatgcgcttgccgtagttagattcatccacgttacccagcaatgatgtaccataccagcaatcaggaatcatctgtaacacatcgacaacttcacgcagtgcagccaggcgagaacctttaacgccatacttcgccgcttgcttacgaacataaccaaacaggccagtgagttccgtagtgtagaagcgtgaacggttagcgcggagatattgccagatatcagagttagcgatcagtttgctatcatctgcatgaagcatatcaatcgccacggtgtcaccatcacatgcgaggctaataaacttttgcagactgtaaatctgacgatctacgtcattaacaccgttctttgagtttttatcgccagttgatgtatcaatagacttcttcgcagtacctaacaggatttcgcgaggatgagggagatagatccctttgtagtctttgtcgcttgttggtgtttccagtccgtacaggtgagaaccgaatacggtttccataatcattttcatcagaattcaacctttaatgtttttgcgatcccgcgcaattcagcggtagtaatatccggaatgtttgttccgtagctattcccaaatacttttttaatcttatcacacaaatcgcggcgatacaccatttcatcatattcttcttcgctgcgatacagttgataacccatccacccctcagcccatccggaattgcgcttgattttaatattagtacaacaatcagacccatcttccggtcggaaagatgcatacaggtactgacgcgcaactttttgtacgtaaagggttttggggttgcgattttgtcgctggtcactacggatcccagcatcatacaacgtatcaccaactttcacatcacttaaatcaatcatttacgtctccagcaattagttttttcacagtaatgaacgggaacaggcacacccaacgtttctttactgcttctgttgtatgttatcacaacgaatcggttttcgccacccctaacacactccagatccaaaatctcgcgggttcccttcgtgttaatgtctgcaacataatattcttcgttgttgacaatcactatatccgacataatcaagcgaggtttcatgcagcgtacacctctgattcatcgatccattccagatcctgattgagtgattcaatcagctttttatcgcgtctggaaataacaacggtagaacctttttctgccttcacgatgatatcaccagaagaggtgatgtattcaaccacataatcacggcgagggcttccgagtctatcaccaactttaacagcacgtctaaccgattcatgagatttttcggtgaacactaattcatcacctacgtgggtaacaataccatcaacagcagaacgagaattaacataaattttgctaatctccgccatgaaaacactatctctcagatatcgagcagccactttatctaaacactgagaagatactttatctccgccaggatatactgagataatcattacatgaccctgaacacgggcggttcctactttatgcagaatgtaaaccattgaaccatcagaatctttagatacaaggatcacgctgaaagattctttgtgttgcttctgagtttctccacaggtaaaactcacgtccagaaaatcaccaactttaacagcacggggttttgctacttgttcacgagcactaataacagggatcataatcatttcctcacagtttcaaattcttcatcagatttccaatatacgttaaaattacgacaatcatgttcggatgtcaacgtatatttttcatttgttttctcatcggtgataaccatagtttcattatcgattgagttaacaccataaacgaaaacattctcaccgcgtttgtttaaaaacgcatcacccttttcaatcaactgccaacaggcaacaggcaacccacctggacaaatcggacgggtaacaagacaatagggatgtttcataataagcctcttttgtttctgtaggcccaatatagcaaaagcccctgacctaagtcaagggctttgttttaaattccggtaaatgctacgatgatttgataatgatcatcgaagaatagatcccgcatcgcgatcacttcgtgcatcggtagccagaacgcgtctgctgcatcatcagagccgcccataatacgaggcaatgaaccatcgttattaggttcgagcttgatatactgtgctacagtcggttttgagaagtacaccgaacgttttggatgatcgaacagcatcgaattacggatagaaccacgaataaccttttcaggtactttaattcgtacttcttccagcaattcacggatcgcacaatcaaggaacgtttcgttaccgtttttgtgtccacccggaagcgctaacgcatctttaccaggtgcaaacttacgacggattactaacacgtggttattacatacgaccaccgagtcagccgtgcaacagttcagagaatccggatacggatattttttgaacttgtcaatctctcgttgccagtgtgcatcttcatgggacaaacgctggaattcttttgtttgtgtccattcatcgataaaggaaaccgtagtgctaggcgcatattttaacaaatcttcgtcccagccttcatggtgttcccagataattttgcgtaaattggtcgaggacagatcctgatctccaaccttcacaggttcaaccggaatatgattccatccgaatgctttaagccagtaagaatctttgtctttttcgtatccgacgatcgcaattcgatcatttcgagtttcatcgattgccatacgaacacgggatttccatttttcctcgttatagaggtaatccggaatgtacgcgaatttgattctggctgcatctccaacatcaagtttacagatagaccaacgagtgatcattgcttgacgctgtttagcggtcaatgggtttagtgtgttcggatatgcataagcagaaccgatcagaatgtaaaccgtatcagcaacagcaagggcttcccttaccattttctcatgaccatagtgaaaaggttgaaaacgtccaattactacagctttatcatatttgtgtttcataacgtgctccacgtttaaaggttaatcataaaacagacgcaattatcaacacaccaaacaatccaccaacgaaaccaaagaatagtgaaatgagtatagtcagtacgatctgttttatgttcattatagtattctcgttttagatgtcaagcccccaaagagggggctttaaaacattatttacgagaatcgaaaatcactttaccagcataatccgaacccattacagtttgaggtacgccacctttatagcgggtagagtagttcatctgtacatccagttctttccagcggatcatttccggtgtaatggtgcgttgcagggcggcgttggcttctgcttctttcttcgctgcatacagacgggcatcagcatcacgttcgttagcgattgcagcgttttcacgcgcctgacgatctgcttccgcttgttttactgcttgtaatgaagtctgttctactttttgcagttcagctttagcagcgttaacctgttcttcgcggatcttcgtgttagttacctgttccatgataacttccggcagggtgatatcctgcaagaatacctgtttcacagtgtaaccgtaaggccgcgcataatcttctacttcctgctgaatcgcaatttgcagttggttttggatcttcgcatcaaacaggtcttgcgcttttggtacggatttaccaaattcgcgaacagtggaaagcagtttttcggttacatacttatccagtgcctgatcctgattacccgcgttgatacggttgatcggtgctttgctaccgtcgaattgcagcattacggtcatatccacagtggatttaaatttatcctgggacggaacctgtaatttgtcgaacttcatcgcgatgtctttggtgctgaacgtatcaaacgttgccagcgggtttacaatgtggaaaccgggcagtacgggtttcggtgatactttacccatgaaggtttcagttttaaccgtaccgtcttgcacaatggtatacatgttaggcactaaccacagtgctgcaactacgcccagagcgatcagagaggttttcttcgggttgttcacgatagtgtttaagttcatcataatttccataagttgttgttcaattcgatagttattctatcatcacatttcacgctgtcaaactatttttaagaaagttttgtcagcttgtagattgtttgatagcacaagcccttaatctcgtccaggatgttcttcaaagaactatctactgattcgtagatctcgtttgcttcgttggctattttacggagatacgctaccgtgtcaagcatattttcggtttttagcacaggtttgtatcttcccgtgattcctatgtggatttcggtgaatttatcaaccaaatcctgcatatcttcgtaaaaaccctcatatgctttatgttgtgagtaggaacctgttgcaaaatgtgcgctatgcatatacgtaacggacataaggcacatgccaataaaggcatctatcttgcttgagttctcagattctgtaatttgtttaaatgattgcatgatgatccctttatgaacgatggatacttgcaaactcatacgcgaccctaattcctagctttgcgcattcggattcagatcggcattgtttttggtgccattttcgttccatgtagttgtagaatagttcgcttgtatttacgctgggagggatcgttgtgatgtatacttgaagggccgcattaatataatcgtcaaattctttctgaaccggacggtcggcggcgtgtgttgtgggtgtcatcatcaacaatccgaacagcacagccattgatatgcgtttaatgttcataacaattactcttttactcatagacccactataggtctactcctgtatatatttatagcaaaaacgaggccgaagcctcgttataatatttttgctgtaaagtcaatcaagtaatgtcataccaacacaaacttctttcgaaagcgcgtattttgttcacgttttctacgttttcatcccaaccgatcacaccagctttcatacgtttcagttcctgacgtaaacgggtacgtacttttgaatcaattttctttactgcaatagaaagcattgcattcagatcgccatgagctttgttaccgtcgcgacacagattattatcaaatcgaatgtatgcacatcctgatttgtgtttccagttggttgagtaccaacgcaacccatccggatcaatgccatgttgagcataataacgagaatactcttttacttcttcgatcttttcgttagatgaaaggtcacgaagaggattgtatttcttacggtaagtgcgactcataatgatctccttttgtttatgcttccactgtatcagggttgttctttagttgcaagtaatgttttcgacaaagtgaaacatatttgtcttcggccccgatctcaatctggtcgccattagcaacaaattttccatttgcatcaatacgggcaacggtagttgctttctttccacaatgacaaacccctcgcaactccctgatctcatcagcaagtgccagcaacatataagaaccttcaaacaagttcaactgaaaatcggttcttagtccatatgtcattacgggtatatctaattcgtcaactacccgacacagatccatgacatttttcttggaaaggaattgtgcttcatcaacaaacacgcaagaaaccagattctcgctatcactgtaaaaatgattgttgtgaacatcataatacaagtccatatcaggcgtgatcatggtgcatgttgcttccaacccaatacgcgaagagatactctgtttaccttctcgcgtatcaattgctggtttgtacatcaggatccgcataccgcgttcctggtagttgtatgcatcagtgagtaaacgagcactctttccagcattcattgatgcataatgaaaatatagtttagccatttatcctctcaacaaaatctggggtattttggaatttcccttccccttcatggtttttgcatgttttatttgaacagtagatccaccaatcccactcatcataagggggtttggtaatgttcattacacaaattaaagggaaatgacaatcccgacagcgaacattttctataatgtttgcgttagccatgcgtataaccgcccatttcgctatcttgtgcttgatggatatcaagataccacatattgattttgcttttcagttcgcccatttctttatcaagcccactgtcaacaagacagagaatgtcaaccaccgttttacgctgggtgatgttgattttgttcgctttcatcgcttgcgccaatgcattacaggttttaaccagtgcggcgcgttgtcctttgattacggcgatccgtttgttcgctttcttaatctgccgccctgctttgataggatccatcatgattaattcaccttacgaggatcgaaatgaacgacaatgatcgggtaatcaccagtcacctcattaataatgcgcttaatgagttcccagtcgcccccagcgagtccagcaccgattaaaggtgtgatgataggctttccagtcttaacggcgtcagcaagccctacagcctgtttaaacgcattaccgattgcatcataatcgacacgcggcccaggtgtccagaaatcatattgagtatatgcattgaaaacaatgttgcctttttcgccaatgtaaacagaacaagttcctagcttatcacgggaaccttttaacgtattggcatcaacttgaaatgcaccaggaatacgatcgcggatttcgcgagcaataccagcgcccatattgcaatagcagttgcatccgtggatcaaatggccttcaccattcagatacatattgacagcattacctttcacttctttaatgatcatttttattattcctatataattcgcgttcgattagcatatcgatgaaatcagtaatatcatcaaaccaatccttagtttcttgagcatgagccaaatcaccatcatctaaaaacttttcgcgagcatcagcaaaattatctagtttgttatagagttttgctttgtctatatcattcataaattaaccttaattattaaaagaacgtaagaaaaatacgtaatgtcacacctgtttacctttccgttcacggcggcgatcttcttgatgacacatatataaaacaccaccaaaaattataaaaccgataacaacgcctataaagtatccagcactaaacatagtcatcatccccgcaatagtaacaaggcccagtactctcatgtttaccagcattgtacgccaagaacaccacaaccgccgccataataataaaaatccagatagccattagtaaagccctataccagcattgaattcatcaaccaaataagtgcggaacttttcacaccgttccttatttggcgcttgtttgcatagattcatcattggttcagactgcaaaaactctttttgtttcagcaacttaccgcgtttatacaggtgagcattttcctctccccacatataagcaacatctaactgttctgcgatcacttgcttacatactgcgacatctttgatatcacgattgttgcataactcatccaggcgagcatcacccgcgtgagcaaatccagcaaccagagttaaaagcagtgctaactttttcatgatgattccttattcatcctcttcgataggggtataataatgcgcattgcagatatacgcaagaacttttttcagagacatatcagagaatgtcggatcctgatttcgtctcatcccactaccagtttcaacagcccaacgtttgttagctggattgtatgtcagccagtagcaatcccattcagacagagtatgttcgaacagatcgaaacgcttacgcccatttgcttgcggccttacaaaaggttcaaccatttctaaagcggttaacactcgattaatgttcgaaccgtcttcatccatcgcaatccgcaaacagtattggttaatgtccggatccataccatcgatacccaggccgatagattcgaaaaattttgtcgccgcgtgataagacacactagaagaacgatattccaacatcacagggatcttttccccgtccttgacgttgttaatgatatcctgatcgataagttcaatcaggtctcttttctccttgatcaaggtagaaatttcttcttgcagcggggctatcttcgcatgaagttcttttatccgttgatcaattacggacacttcgaaagctaaatttctcattgcacccattccccgtttttgtcgatgtacatgatccaatcagcaaccgcccaatgggaagtattgcctttcggagtcgctacgatgtaggaaccagctttaaacagtacgcgtttagtttcgttcaggatcaggtcactcataatgtattcctctcaattagatgcatccataataaaaaagcccccgaccgaagtcaagggctttttgtcaaatgatttgtttttcttctaacagcttcgcggttgtattaaccatacgagcataatcacgggcttctttctttgtatacttgaaaccagcgttatagctcgccagcgcctttttcaagtcgcctttgtggtaatcaagccaatactccagttcatagatcgcatacttcgatccaccttgaagagtttcgagctttttgattactacgcgtttaggatatgacttatccattcgtgcgctggcgctccttgcggtaacttgccagcatccataagcgtgatggccttttttacctttaccgacattctcacatgcgcgagactcgatccaggcaatagccgctaaatgatagcctaaacgtttagccttatctttttctacaggttttgcagtcttcaaatcatagttgtgtccaactcgataagcatactccagaacctctttctgcttcggtgtgatgttatccaaatccttgatataggatggagaatttttgtttgccggaggctttacagtagccttttgtaaaggcaattgatgagtaggcaaatccgcaatgaaatcccctagcggatccgttgcagcgttgccagaaaaagagcacaagaaaatgctggcagcaattataattttcttcattttaatacctatgttgcaaaaagaggggcaataatacaccccactttatatttatgcaactattttatatagttttcgcgtcgcgtagtttatcggtgataaattcagcaatgttataatttgaaatagccttgttaggatcgtatagtgcaacgatttcatctattgataccataacagcatgtttaaagtagacgctccagctagtagtaaagatttctctgttgtcaaatccacaatcagggctgaacaaagcgcggtatttgtatccactgtatttcgtcagacgattcgtgctgtgcgcgtcactggtgatcagaaaagttccctggtgagtttccacaacgaaaaagtatccgaggcgttctttgttgtccagcatcttttcaaacttgcgatcggtttcttcgcgaacaatacgagaagtcagcatttccaacactttatcgtattcgggccaatcattctcgatcacgatcgcatcaaatggtttcttaccattaatcccgcgcccgatttcgattttcgtgcaaatttcgttgaacgttttcaaatcttctggcgtcagttctttaagatcgctcaattttgctacataataacgtttttctagtttcattttacggaaacctcaattcaaaaatagtttcactgagttaccacatttaggacatatgataaattttttcacaacataatcagcagcagagaaaaatccattgtaaatcgcttctctcttttgctgtatatcagatagttcatattctaacccacttttacagcaactgcaaacagtaattagttttgggctatggatgacagtaatcatatacacctcacaaaaaagggggctttcgcccccatcattagaaattgtcttcgacaaacgccgcgagacgggaacgatacactgtatcaagaatgatatggcttgagtgttcgtattctttcagcttttcaacagcccatacaaacccgttgttaacggcagtgtttcgagggttgtcgatctgcttaatgttcccgcatagtatcagaagtgtgttctctccgcaacgagaaatgatagatttaatttcgtggttgctaaggttttgacattcatcaacaatcagcacagaacctttgcccggatccggatgtccgatactgcgaccacggaagtaatacaggctagggaattgaaccacccctttttcaatcaaaccttcaatgtatttttccgattccggattatccttaaacagaatattcaggctagtaatacaaggttcgatagaaggccggagtttttcgcccaatgtaccaggaaggaagccaatttcacttgataacgggctatctgacttcacatacatcaagttagcgtaatgtccactattaaccaggtgcatagcaccggaaacagcaagcattgttttaccagaaccagcgccgcccataatggtagcaacatcgatttcattgctcataattgattcaacgaaagccgcttgcagagaatcacggggttggatagctttcatgagtttgcgtttcatagcctgttcatgcttaacaggtaagacattcaagcaaatctcatcagcagtcaccacacgcccgactaactcaccgtttgaggtaatgtactggttaggataaaaatcttcgtcaggaagcgaactgtaagtgatttgggctacattatccgtatatcccaacacttctacggtatcccagaaatcagggatctctacataaccggaatacaacacatcgctatcttttaacgtatcgtcgccagtatactgttctaccttacacccacgggacattgcgatcagcaacatcataatatcgcgagtaactaaggttgcatcctgttgcatacaagtttcaatgattcgttcgtcttgcttgtcaagagcaaacgttttgtttccgacataatcaaccactttaagggtgatagtgtcagacagtgctgggtttgtcaggtttaaaggaatacctgatttcgtaatcgcatcatatgactgaccgaaaataacttttgacagaagccggatcgccaatcgtgcttcgtgcgctgttcgttctttcgttttcaggtgatctaattcacccatagtagcagaggtaataatgatttctgtaccaggttgagtgaatgaatagattgaataggggttactaatcaaaacattggtgtctaatacgtattttgacatacattaaccttatgtggtttcgttaaaaaatgcaccgaaaacctcttttgctttccggttataaacggattttgcttcttctggagtgttatagtaccccaaaaattttctttttccatctatgtttatctgcgctttgtacttcccattggctttatgataagaaacacctttcaaccctgtactactgtttgagttacatttctttttcatcgcattttgctggttcgtcgctttctgtaaatttcttgctgtatctccattctcaacaccatatacatgatctacgataggaggaagataaccattctcaacgtaaaacactattcggtgtcgcaaatacatagaacctttaaaatgaatttgggaatactcgtttttgcttccggcttcacttccaggagacatagggccgcgctgaactttccaatacactttacctgtagatgtatcaacatctacaaaattcagaagagattcgatcccttgaatctcttcatgtatggttcttgatgaatagccatgacttttcattacatacccagcgaaattacgtgaatatatgctaatggatgtttcttttgtacacaatgcatgagtgtattatacacaatgtccatgcgttcattgcgcgtaagatcacactcatcaaaaataaggtttattgcctggtgctctattcgacgtccacggaaatgattaagaattgcccctttactggtcaatacatcacatccggtagcaccatttagctgtttggcgtcttgtgctgcatttaacgtatgcgctacgtaaatgttaagggaactatgggaacgtttcataaaatcaaacgcgcctttagtcttttgcgtttctctgcccagatccagcctggtttcgaataccataaaatcgttagggccgtaattatgcgttggttcttccaactctcgcataagatgcatcttacgacattcttcaattgtctttacataaaattcactattcatgttttacctttaaggggccaaagcccctttgttacgctaattccacatgcggggcatcaatgaattttgtttcgatcggaaggttcggatcatttttccagttgataccaaaacgcagtttaacacccagttcatcacctgcttgtttaacagcattcaggacaggcaaccacactttagggtttgtttgccagccttgaggcaacacgctaggatacagatccaccgcatcacccgtgatgtgttttgagttcattgtttgagatacacccttacggacgttctcgcgctgttgttctacagtacgcagaccttcacgtacaccaaaatcaacaggagacagttgcagagcacgttctacgactttcaccagttgaggtttaacgcctttaaggttgttaaggcttttttgactgaatttaaacataaaatcacctcttgtaaaaataccctgtttgggtacacagggtatttatggtttaagaggttcgataattaataatcgtaaagatcaccgaagcattcttcaaattcacgtttacgttcaatttgctcgtttctacgctctttcatatcaggaggaagacggttttcattgacttcatcaatgtaagcctgtgcatcctcttttgttagaaagaatgcatggaaattgtatccgttgtacccgttcatactacgatcttcaagagagaattctgtgtgacagtcccagtctttgtacagggtaatacatttagcaaacagcccaataccgcgatgaatgtatgggaatccagtaacaatcatcttgctacccatttccgcattttctccgttcacacagaatacttcatacataatcgcacctggtttaacatctttcttaacagcacgtttttcaaaagcacttttcataatatattcctctcaattggtgtaactacagactactagtttattttctggatgtcaacaaggtttatcgtttttagacggaaaagttagagtgaacaaacgatcatgaaggttgtcgatccgttcacaagcctgtttcagtatggttttatcaccatcatttgttgtttcaatgcatccaagttcatcggtgtcaatgttcactacatcgctcatcaatgaagcaaacacgttaacatcaggatgtaacagttcttcgatttcggccttcatgccgtcgtgttcagaaaggatatcaataatatcacgggttaaatctccctggtacgggaaccctgtttctaaatgattgatgatcctttgtgctttcgtaatcataattttacctacaaaaaagcccctttcggggctagttaattagagttcacagcaacggcacacaccgtattttgtaaatggagcatcaccgctaacgtaggcccagaaatcacatgcttcttcggcagtatcgaagattgcagcatcatagaacccgtgggcttcgttaccgttctcatcgatgaaaaccggagtccagatattaggattgaagcaatcgtcaacaacaacccaaccttctttagctttcattgcttctttgttggcttcgatgtgagctaagatttcgttcatgatgtccatttttctctcctaaagtgtgtttcgtttcgacagggctatagtctcataaccccgtatctacgtcaacacttatttgaagcgaattgtgctatttttgaaaaatagtccagagcacacagcaccttcaattttcacccctgtagggcttttagcaacgaaccctgttgcgtaggtgtctttctcatcacatgcgaaccaggcgtggcctgtgtacgtgatatcgctaaacccgttagcagtcagaatacgttcggcttctttctcatcggtgcatccggattgtgctaaaacgacaataacgactaacaccaaagcaataatatatttcatgttaaactctttttaagttggttttactggcttcaatccagtacacgggatcagaatagttaccacacatacccagtaacacagttgtacatcctaaatgatcggaaggtctcaatccatcaggatgaaaaggcaattcgttaacaccgatactggtagcaaaaagagcacctccagtactgtaaaatgttttgatatgatcgtatgcatcatcaggccactgaaaacgataagttttattgtcaatggttactgtatacatatcatattccgtaaacaacggatcttttccttgtgttgccccatacagagcgccgcgccattcaaccagatttgcttcaatgtcgcttacacaaatttcattacccatacgcaaatcatgaaggatcccttcaatggtacgaatagccccgctaagttcattagttaacatagagtttccttaaagtctttccagcatatcaggcccaaatgccataacaaaagaacccctcaacgcttgccactttttatggaggcgcttaggtacgtttacttgcaaacgatccattttacgaataagttctaatgtatcgttgcttgtgatttcattgtaacctggatttattgttgcgatcccatatctaaacgccattccagcttcggtatttccaacaaaaacagaggctttcatttcatcaaaagattgttcaaacatgagatcagttcctttaaattggtttaatggttttcaggtatagtttagcataagaagaaccaaatgagttaccattatgatcaaacttatgttcttcactcttccagtatttccccgatttcatcaagggtatacgcttcttacctgctgttatcgtttcaaccattccggtatgagtgaatgtcatgatataccctcttctttcagtacttcccagatcagtttatcaaggtgcatcaggttccacataaccgaatcataagaacccagtgagcgggagtaaatcactccccatgaacgataacttttctggaatgcttctgcactatctacatcatacggcatatcatcaccggatgcaatcaaaagtttaagaatcatcagactgttcagaagttttgaactagcgtcttgtgcttgtacttttgcacaataattttcaataatcgcttttgcctttggttcggtgatgcgtccatttttgcatcgctctttgtacacatacataagttcatcgattatttcttgcatacattctttccttctgttcggtgctcataccatacaactgagagcgtatacgatcttgtatacgacgcgtttcgttttgcatcagttggtttgaaagaatcaaatcgactaccgcgccgcgaactttccatagataatcaatcatcgccatatcttcatcagtatggaaacctttcgcatcacattcatagataatgctttgtctttccgccattgccatttctgctgttgccggaatagccagagaatattcatacttctcgatcaacgattccagtgtacgcggttttacgggaatgtcaatcattaaaggattaattttcatttcaattccaccgcgtatacatccaattcaggggctttatgtacgcgcatatctttaccacatacagcataagccggacagttacggcaaccgttatgatccttgttgccaatcaattcctgacggaatttcttagttttcggatgttcccagatatctttgataaagtcactggtttccaggacgttaagcccttctgaccatccaccctcgacccaacgttcggtaaaggaacaagggaagaattcacccttctcgttgatgtacgagctaaacatagtagcttcgcaatcttccgcatactgtttgtactgttcaaaattttcatgcccttccatagcctctacaaaggccggagcggaacaggaatcaaaaccgaaccctacaccggattcaaggcaataatctaccagcgctttatactgctcgcgtgtaacggtatcccagttcttcccacgacctttttgtttcagacccaggaatacgatcgcgttaacttgtttcaagcgcggatcattctttacagcatcaaccacgttaaacgcgtcatcataggttttagagctaaccatgaaatgaaggttgatttgctgttgtccggcttctgcaagattagccactgaattaaacgctacatcgaatccagcatgtttgtatactgataccgcaacagccccagcaacagccgctaaacgcgctgcaacgtcttttgatacatcagcaatggtaaggtttggtacaatgcctttagaacgcgcataggccatcatatcaaacatatcagggtttgtttgtccctgtgcatcagcaccgagggcgcattgtgttaaccagggcattttatcaatgatagatttgaatgtatcaagatccatattgaagccgttagggttattggacttgtagcagaacccgcagagtttacccgctggcccgttgcatttggtagtgatctcgatatcgagaatttcggggaatggggcataggtaggatcagtttcgaacgatgttccccagcgagcaaactcaccagttttaacgttgaaattgtagttataccacttagagcgagcgtaacggatatcaccatcttgatagatgaacagggtaggagctttcagaacagtttgtgcgttattcataatataattctcaaaatctaacatgggattggaagacagcgcgagcgagactttcattatcaaacggtattgattggtgttgccctttgctatcaatgttaacgcgccaaaattcactagaacaattttcagtggagtagttcaacagcgttaccgttttattcttttccaaaaatacgcgtttgtcaatctctgttttgattacatgttccatcattttacccaccgttgtttgcgttcgtcagccagttcttttttgtacaccttgatgtattcgccgttcaaggcacggagatttgaaaatacacgattgaaaagatttttcttttctttgtatgccggagacatacggatcgattcaatagtcatacccatttcatttttaggatacgctcttaactctgcgccgatctcatcgatccatttttggtacagatcacgcttttctttgtactgttcaaaagtcaacatgtccattttttatccccgtttcgtttcggtatgggtgtaagataacatcatcctacacccagcgcaagagttatttgtattccatgaagaattttattgcttcttctggcgtcataccgtcagagaaaaatccaaagaaagtacagtgatggtcgttgtatgaaatattcaaaggagatagtaaacttcgaacatgttcagcccacaaacgatattttttgctgaatggttgatctctcattcttcgtccccttgtgcgtagtattcacacactgcatcttctggggtgcaaccgtccgagtaaagagcatacattagatcttcgtcataatcagaagaacccagcatatgttgaacagagcgtttccatttgttgtaatctttttcgcactgggtttcgctgttttctgatttaagcatttcgtacatgttcatagaaatctcccgtagtcggttgcagcatcttccggatccgcatcaagttcgtacagttcgcgagctagggcgctgggtttaatatcgcgccctaagtgggcgctaacattacgtagccatttcatatagggttcgaatttgttcattttatacgtaccgcgttaaaagcctggttccggagatcatacgctttttcaagctgttctgtagtgaacagagaactatccgagtttaccgtgaaactgtaaatggttttgttgtcggcgttgacttcttcgacaacgatttcgtaaccccagatcccgctgtactcacatttcacgttccggtacttgatgtaaactgctgcaacatcttcttttttgtagttccggcttttgtagataatttccatgatatcctccttcgtttcgatgtgtgtacaataacagattggggttatagagttttagcaattcgtgctaattatgccattttcttagcgattttccaggcggctttgaatgccggaacatcttcaatatcaacccagaaaccagcaccaaaaccatcatcgtagcaagggcaaccgtcgcagtaattttcccaggtcatcacttcaccaccaacagaagcaccagtttccatagcgcgtaacgcatcttcaactttttccagtttttctgcgttgttgtcataaatgatgaagtaccattttccgttgtattcgttacccagtttgattgcttcgcgaacaagtttcatgatgatttcctttttgtctgtttcgtttctatgtgtgtaatataacaaaacccctaaccataggcaaggggtttttgcaaaaattatcgtttgatcggggtattatctataacccgttgaatttccgaacgcatcgtagaatactggcacaattcggtaagcgcccgatccaggtgcatcatagcgtaagaaaactcttttccgcatttgtcgcatctagcgtataaatgtaaatgaattcgcccgatcccatctacctgactatatttctggaatatgtaaggatctgcacctcgatagccagtagcttcgtgcttacactctcgtttgaaccatgacattaataatatccttgtacgttgaagcgatcacataacaattttcttgtttggttagtatcgctttggatagaatgcaacatagcgctgatcatgtttaggttattttgcatcatttccgcgctcatgagaacttccatacgcgcacgtaagcgtttattttcttcttccaactcaaccatacggtcatatgctttgatgcgctctaagggcatatcaggacgctctttgagtacgcgagcacgttcaacctcacaagcatgatttgctttccagtggttcgattccgcttcaaatttattaaggcggcggatctcttcaaccagctttttgatcatgtgtggatccatcatgtcgatgaatttcatcaagcaattggattttgtttggttgtcagcaacagaccaagacgaattatacgtaaccgtaaacgtgcggcccatttcatcaacaaccccgatcttgttatcatcggtgattgtagccgcccatttatcccgcatggctgtacaggttccactggcgacactatgcaacttgtttaatgttgcgtcatcaaacacaatttcatcactcatgtatgcctcacatagatttcaaaatacgcagaagtgcgttagtaaagatatcaggaacacaaccaccaaacaacttatgattcatcagcgctaatttcatgctgtgattttcagtatatcgcccgttatggatcccccaggcaacgacattaccaggttcatgaataactaagttagtgagagtaacggtcatgcgctctttatcattgatagagaatgaatagcagtaaccggatccgatgtcgccgtaaaggttaaggtctttcaatttcccttgctcatgcaagcgtttcatatgaactgcacatgcatgattaatagtcatttcgtcatccctagcccagtcatcaataccagaggtataacgaatattgaaatagttagtcagttcatttgatacgctcattagaaacctcacttttataaaattctttaccagacccattacagctactgcatttgggggaacggttgttatcataccgccctgatccattacatgcaacacatttccgtaatttccagccatacacgaaccgcatgtaataatcggttcgtgcggccttgcgttcgtggaaattcatactttgtaaacctgaaccaaccacatttcgatgttaggcgcgtaagtaacgtttaccttatgcatagtgcggtatttgtaagcggctttgtacgcatcgagttcagtcggaacacagaaagagaaaccgttatcatagcgttctgcgttagaaacttcacaaccaactacagcggcaatgtttttattcatgttcatgatattttcctttctctgtttcgtttcgatgtgtgtaatataacaaagcccctgcactaatgcaagggctttttgattattttggtaatttttcgattgttgctttcaactcattgattttattaaagagttcatcgctatatttcatcaactcactacggcgtttttcggcccacttgatcaggaattcaggagaatctacaccatacgtgtaaccttctgcactcagttgaatacgagcacgggaaccataatcaacagaactttgttcaatgagaaacttgaccgcatcaagcagggctaaatcttcatgacttaccatgattccttctgcctttggaagatccacaacttcatcctgaatgagttcacggcgggttgtttcttccagtgtttcatgattctggatcatcgtttcgaccggatcctttgccacggctggtttgttttcacctacttcttccaaaaacatcaacatccatccaggaattttagtccggaaagaactttgtacttcactggtgcatgaatttcccagaatgtggatcgcgttaccatgcatatcagctttattgatatagataacgttctgctgttcctgtcggttgctaccataagaaaggaagcggcgtaacgatgtgttatgaccatacttccctaaatcgatttcagccaggcaatcaatgatcccacggttagaaaccttgtaacgtttaccctgtttgaaaaataacgattcttccaggtgagtaggggtaaactcttcataaagaacatagaattctttaggaattttgcgctgaaccagactcagtttacaattattagaaggaacaataacagagtgaatgtttccttcggtatcacacatagcttgcattacttgcggatagtaaagatggtctttcttgcaagtatagctatggatacgactctgacgttttttgaagtaccatttaccagtttcaaaaggcgctgttgtaaaattcattttgcattctcatacatagttaaaattgcttgcatatgttccggtgattgtggaacccctgcaaagttcactttcaaaaagaaattcaaccgatcttttatgttgcactcatcgagcccaagcgctggcaatgaaatgttttcaaaagcacgttgttcatgtctttccatttcaccccaaaacaaacgggaaccgttaggcatcggtattccaatttcgttgttccagaatttcatgatagttgtcaagcgttgttttccatcaatgacttctacccatcgagattcgttgaattcactatcaaccgcgatcgcaatgataccgcaaggaaacccagtaatcaaagtcttcatgaaagcatcttgctctttctgcttccacacgtagggccgctgataggacggattcagatccagatcgttgttcttgaaccaatgaatgtaactaccaaccatgatcgcatgatcgcgactttggaaagtttttaactcacgaatacggtttcttacaatttcatccgacattataaaatcaccatccagtatataatcgtaatcataaccgctacggtgaaacatattgcagcgtacacccgcgcattatgaacctgtgttttcaattccgcgatctcttgatccttttcgctttcaaactcttcgcgagtaccataatacccaggatcgttagcagttgccaatctaaccgcatctttttcaaccagcgttgcataaccgctttttatttgtgtcgccccgtaccatccaccccgatcgttgttaatgatcaggtgatcgcctttttcgttatgctttgattcgccaacgacaataaccctcttaccattcataatatgatcctcaaaggggccgaagcccctattttgcgttcttctgtagataatctaacatattcccgctttgatgtaaatccaaaactttagaaaacttctctgcgtttctttcgtttgtgaattcgtcgaaatgccatacaccatcatcagctattaacgcgccaggtgatgaacctgtttctacatcacgggaaagcgcaagccccagagggtgtaagatttcgcggttaatgcgccaaacaaggcccatttcagatagagtattaaaatcgacgtatttcatattatacctttggtttaacaccgtaggccaacataccgaaacggtgatcgttgtctgcatctttaaacagaacttcgttaccatcaatgcagagaacctttgcttccggatcgatgtatggaagcaaccataaagggatcaggcgtaggccgctatgttcatcccaacgactgaaattgagttcttccagttcatcaagggaaagctcattaggatcgatataacggaaccatttggtatttttgaggcggtcggggaagtttacaatttcttcatagccgaattcagcactccatgaagagtaaacagtgacttcggatgctttggttaaaacagcatcgcgaattgatttgcagatatcgattaaagtcagttgattttccatgatatatttctcatcttgctaaaattttaggcagtagttgccccatcgttttacgtgcatgtgacggaatctgtgagatcgggacatatttaaaatcatccatttcacgtatagtccgtccgttcttaacgaaagttgatgcacaatagcattcttccgctactgggtaatcttgccctacatagaggaataaagcaaggttttttgttttcgtgtaatcgagaacacccaggctaaccaattcctccgcgaacacttcaaatcctgtttcttcgaagcattcgcggatcgccgcgtcaatatgagtttcgcccttttcaacatgccccttcggaatatcccaatggggcgtttcggtggcatggcccatcaacacggcaccatctttaataaagataatacccgctgatagttccatttattcacctgcaaaagcgttatcaaatgctttaagtgcgttgttagcgcgagcactggcttttgtcacaccagcagaaaggttttcgaagaaagtatgtttccacacttcacgacgactggattcatgctccagactgtttttgtgatcaccgcgaatctgttcttccatgtcataacggtacagatcgagttctgcgtttaatttctgttctaatgcctgtgcaaatacatgttcaatattcattttgtatagcctatttcagatttaaggttttcgagggtggagtgataaacaacattcccttcgtgtcgagtataccatacttttccgttctggttacactcattcattacattttcatctaaaccagggatcggcttcatgctgggagaaaacgcgatagacatcatttgttctgcactatcagcaaacccacaagggaaaacaaatccagttggtttatcaagatacatcaactctactttagccatagatttcttcgaaatcctcacaatcaggcaaatacgtttcacagaaggtgcaaagcgtaaagaatgcaggttgacgaataccaggattatccggtagatacatccagaaggtgttagcaaacacgatgaatgttttcaggttttcggtggtaatttcgctaacaccatcatacccggattgattgatcgcgcgttgcagcggcacctcatactgttcgcaatagtcggcataatgatcgcttgttaccaggctattagccattttaatcaaatcaacgattttcatgattttacatattccactttaacaggttttgcaacaaatttatctttggtgcgcccatgaccattacacaggtcacattctttgttgaaatctttcatatcttcgacccatccagaatctggcaacccagacggatatgcgttataacgaatggtttcataaccttttccgttgcatttcgggcaaacatgaggacgttcctttttagcagactctgccagttcgcgaagggtagtagaactaccataagcccgacacatgttttcaaagtcttttaaagtcatgttataaacatcgatgacgttatattttttgccggatggtttagccataatatatttctcacttaaagatttttttgatgaaagagatagcaaggccgataccaaagaaaatcaagtaaccttttccgtcaccgtgcgccaaaacatagagtgagctgccgtatgcgatgagttctgcgatgttcattaagtttctcatgatatcctcctttttctatattaagtatcttaccataatataaaccaaagtcaacaacaaagttttatcaacccacttatcaccagtcattagtaatcccctacaggttgagacgccgcaacactcaggatcttgaaagtgcaattgttccattcacaataagtttttgcgcaatgaacacttcctttcataacaaacccgtttgagaaaattaaccagtaaagtttcatgatagcctcctttgtttcgacaaggccaatataacaaagcccctgcacgaatgcaagggcttttttcagtttttcaacatccaaagttgcggaggacaatctttagaagcgattagacgatccaggcgggacataacccgacgataaccgtcgtattcaaaattaatttttggtggaacgtagttgacctggattgtttttctgttagctaaagaaacatactcagggatcaccgttcgcaaccgtatagcgatcactggcttctcttcgccttcgttaaagaacatttgaacagttataggacaagcaaagattttaccatttacccgacgataaacaataacttcctgtgtcccttctgttttggccttcaccgcgtaggttagaacataacacgaataatgatttgctagactcatcatgatatcgcgataagtttcaatatcttttttaatcgatactgaacggtctttaaagcgatctgcaatgtggtcagcagtagc

SEQ ID NO: 24 - DNA, 174531 bp, Unknown
  bacteriophage strain capable of infecting bacteria of the genus Klebsiella
attaccctggacgttgacgccctgaaaaaacttgtaatgggtagcgataaactcgcagcagagatcaagaaacaaacgggtcatgatgtcaaaacaatgaacctcaaaaacccagaaaacgtatctaccctccatcatgtgatcgccgacgttttcaacatttccaacaaaaaccaaaaccgtgtttattccggtattatggcagcaccagaagatcgtaaacctaacctcatctttgacgtaacgttaaaaggcatgagcaagctggcaagcatcgcgcgtgatgtcgaaacgctgggatacaaaaaagaaaacgtacatatcgtatgggttatgaacgatgtgcatattgctatgcagcagaaccagaaacgcgatcgtgtagttcctaaagaaattctcatggatacccacgaaggcgcggcccttactatggcgaagatcctgaacatgggtgattctcttaaacagtatatggacggcgacatttggatcagctttaacaaagttggtgttgatagcgagatcaagaaatcaagtaacaaagggatgtttgttgttaagtcaaactacatcaaagttaaagcccgtggtaagcctcagaaatctgtagctgaactggataaggaaattgtggctaaagttgcagcatacgcaccgaaaactgacacttggggttgacattaatgattaaacattatagtatgcatacacaaactgaggaattgatatgaataagtttttctttgatatggatggtgtattgttcgactgggaaggttcatttgtgccaatgtatggcgaaccctctatgatgacagaagatgagttgaaaaagtgcaaagcaaaaattgccaaaactgatttctacgaaaatctggaaccaatcaaagaaggatttgaattattccatcatttaagaacacttggtgatgtagcaatactaaccagtgttggtaaattcaattctgacggtgttgccgaacaaaaacgtaaagcattgcaaaaagtattgggttacgttccagaattccactacgttaaaagtagccatgaaaaagcagcattcgctggtaaaggaattctgtttgacgatcgggcaaaagcggtgttgcctttcagaaaagcaggaggtaaagcaatcctctttgttggtgataagaaaacagcgcttgatgaattaaaaagattgtaaaaaaaagggaaccattgcggttcccttttttgttattgattagcctttgcaagcgcttccgtgactagctgaatattttcttccagggtttccgcaaggaaaataccaggaactttattagctagatgagaattgttccagatttcaagatgtttctggttgcgggaaatcagaacaccacgataggcatgttctgcgaactgttccggatagtcaatgcgactaaaatcgagacgatggatccccagttcagcgcaaatcttatctgtatagttcagtttttctttcataacccaaagagggctgaccgcttccgcgcgaagcagcaaagtagcaggatcaccgattcggcgttggaaactccattgaaggaggtcaatcccagcctgaatacggggaaggtttttataaaaatcagtacgcaccaaagaagccgccatttcatcatatcgttcttttggcgttccttccggacgtacaccgaacttatcataaaaagcctgagaaaattctgctaaagtgtcgtcgaaatcaaaaagaagtgtattcattgtttgccttattttattggtcaggatctggttcaggagcaggagtcaatgacaacagactaaccagtttaccattacgagattcgattacatgaatatcaccataatcttcaaacgcctctttcagagtatcaaactctaatttatatttttcttccgcataatcgcgccagtcgtcgcctttctcaaaagcatcaacgataatatcgtatagccagtatggaagatatgtaaaactggtatttctccacggaataggatgaaccgtagtccatttttcagttgccatttaaagcctcttagatttgactcattttatgaatatagccgtttcgtgaatcctggatctcacattcaccgttttccatgaacgctttcaggatcgtttgtacttcctcactatacttgtaatcagcataatcagttttccaatctttaccctgtgctttttgatacagaatttcatcaagtacccaataaccgatcggggtaaagctggtatcacgccacggaatcgggtgaaccgtccatttagaaacaagatcatcagaataagtggtcacggtgattgtatcagacgtggtttctgttgctgattcttcatcagcaccgtgttttaagatcagggtataatcgccagcagttgtaccgtcaaccgtagttgtgtaagtatcggcggttgcgcctggaatatctacaccgtctttttgccaacgataggccagaaacacatcaccaggatctagttcagtagtttcaacctctaaggtcaaagtttcgccaatcaaaagttcgtttttgttggcgctaattgttacagaaggaattgccataaatttagcctcttatgtttattggtatttatagccggagtattttaccgttacacgttccgcatttgtcgtagccgttaacacgtccatacccattgcattcaggacaaaacggagtagtaaccccgaaaatgttacggatcgcataagtggattgttcttcggtcaacccaacaaacccatcagttttaataaaatgttctttttgtgaagaaagcatatcggtatcatcatcaagaatgagatagtttttacatccgaaagtatcgatccatgccttgatttcatcaccacgcattccagtactatgagggaagttagtgcaagttttaccaatgatccgatacaatccccacggataaaatatttcacgtagattatgggtactgttgccgattctccacgtagaggaaatgacgatatcacaattagcgtgattcactatccggcgtaagtgtcgtgcgcattcgatgtccatatgttcaccaaatttcatgcaccgcatattatttagaacgccatcgatatcaagaaaaataacgttaccaatctcgttaccatcgctcaaatcttttaaacattcgtgatttaagttcatatttcacctaaaagaaaaggggccgtagccccttgttaatcaataaaatccgcgagcttcattatccagtctacgatctgcaatcatatgagcttccatttgacgagatacgtaatcaggatcacactccattctttcttcttcgtagttgtcccaggtatcagcaacccatttagaaccgttccaacgagcataaccaggttcggcatgagcaggataatttgcttccgcagcgtggcgaagtgcttcaccaacagtgtaataaggagctttagaattgacgattttcttaacttcaccattagtccaaacaaacagaactgggtagtaagcatttttcatcatgttcattttgtatttccttcttcactgcgagagccattcccccgccttcgaatacaaatatactcgaatagcagggcaaggtcaactactttttaaaattattttttgaacgtgtagaactggctgtttcgggtttcccttacagtaaccatcccatcacgatgcatgtaccatgccagcgacttgagggtttgacgcgctgaataatgaggacaactgtcagggtgcttgtaccaatccggattttgtttcatccaatcatagatccaatacggacacgtataaaagccagtattcgaaacagagcggcccatcatgatgatagacggggtaaacccttccatccatgccagttcatcagaaaccgtctcagaatcgcttgtaggagcttgtagagcgtcaggaacaatttcaatctggtctgcgaattccggagcaacatcaggaacagatggttcaccttcgtatgtaacaatttccggatcaggggagtcgatcaacagttccggtttttcttccggtacggcagcttccagatcagcaagcatattttcgaatgacttctgacggttcagtttgacatcaaacgtttcttgcgcgtaggtagcaagctgtaatttggcttctttttgttctaaggctttgaaaccttcaaccttttcgtaatcaatactcattgtagttctccaatgtttatcattatttagcctataaatattcatataaaccgtatataggatacacatagtggatatcgaagtcaaattccttaacactagtcatgtgcagattcaggcagaggctaacatagtctatgaattgcgcgactatttcagcttccagccgccaggttatcagtaccaggcaaaatacaaatatggtggatggaacggctacatatacttgatggactataacgggaaactgccctacggtttagcctatcttgtaacaaaattcgcggagtctcgcgggtattctatctggatggatcctaagatccacgaaacagaagaaattacccagccagattttgacaagtggttagaagaacacccagtatacgacggaaacaagcaaattgatccgtattggtatcaaaaacaatcggtgtttcatgcgattaaaaaccgccgtgctgtgcttaacctcccaacgtcagcgggtaaatctcttattcaggggttgatatctcgttggtgtctggaaaattacacaggcaaagtactaatcattgtcccaacaaccgcccttgttgatcagatgatcggtgatattgtcaactatcgccttttacctcgcgaggcaatgcttggaatacgttcaggaactgctaaaaacagtaatgcattgatctacgtgtctacgtggcaatcggctgttaaaatgcctcctgagtggtttcagcagttcatgtgtttgatggtggatgaatgccacaaatcaaccggacaaagcatacagaagatcatcaacacaatggatcagtgtattttcaagtttggcctttctggttctctgaaagaaggcaaagcaaacatgatgcaatacattggcgcttttggtcaaatcttcaagccagttgatacaaatcggttgatgcaggaaggtcaagttaccaaccttcgaattaataccatcttcatgagatataaagaggatgagattaagaaaatgaagggggcagattaccaaagcgaaatcaagtatataacatcgcataccaggcgtaacgcatggatctgtaagctggcgttgaaactggcaagggaaaaagatgaaaacgtgtttgtgatgttcaatcagatcaaacatggtaaatggctgtatgagcaactcaaaaaggtatatgacaacgttgtatacatttctggggaaacggggattgatgagcgaaacgaaatgaaacggatcgcggaatcaacgaaggggctgatcgtaatcggttctattggtgtactgagtacaggtatttctgtcaagaacctgcatcacatcatcttcggacatccttgcaaatctgctgttatagtcaaacagtcaattgggcgcgtactgcgtaaacatgattctaaatctcttgctactgtttgggatttggttgataacttagcaacgctggcaaagtccaaaaatgctaaaaataaatattcatacaaaaactatggtatgaaacacgcaatcgaacgagtacgcatttacaatgaagaaaagtttgactacgtgatcaaacaaatcgaaatttagaggttaaaatgaagagtttcaacgattttcgactttatgaggcggctattgatgatttcatgagcaaggtcgcctcttgccgtactatggacggccttaaagagcttgaaaaatattacaaaaatcgtgtaaaagaagttgatgttgcgccgtcagacgatatttctatgcgcgatgcgctgaaaggtcgagccgaagaattaaaggccgaactagaaagcggagaagaagaaaagttctaaaaaagaagccccaaccgaaaggaaggggctttttaattttgggacgcaatcagcccaacacgtacatttgattatagccagtgaggtactattctggcttttttactcatgcccttgatcgaaggtatgttatcaatcaccccgccgaaggtaaactccatcggacggcgcaaaagagtacgcctatcatccagcattcttttatcaagcccctttcgggtactaaagttatagtagtccgtgccgttgcacactgttagcttaaaggttccaggttgagataaatctcaatcacggatatatattgcattctatataggccataaggtttattcgattatggaaatgcatccatcgataaacatgcccttgccctactacaatactatttatgattattaaaaatcaggatgttcgtcagattctaaaagatctggacgttcatcaaaaatacccaaatcaatttctttcatgttagccttctccatacccgatttcccatgatttgcggattgccttgatttcattatagcaaccttccatcaaatcaagaagatgattaacttcattaaaatcaatgttcgaataatttttcatattgtacctacagcaacatttgaacttcattcagatcatcggattcgttgatctcgccgttttttgttttttctgcgatgtagtcagcacagatagtactacacacgcgcccggattcagtcacaaaaccagtagaaggaaccggacacttgcacactacacatttttcattttcagtagacattatgcaccactttctaatttacggatctctaacatgtttttgatagagtatcctttgtttttgacgatatccagtgctttgctggtgaaatctaccaccatgtcataatactggatcagcttgttggtttctacaatcttcggatccccagcgatcgcgattttgatttcagtagtcccagtatacaccacttcgcacatttctttgtcatgtcttccggtgtagtacaacatacgatccttcacatcagcttcttttttagcatgaagttggatcagttttttcttcgcgtttgaatggtaacgaagccatttagcccaaatcttagggatatccgctgattctgattgcaacttgaggggatctatcagcatatccttttcaagttcattttgcagatcttctaatttcaaactcataacatactcaccaatttacccagttgatctataatatactatattaatttgtagtcaaatttaaattgatctaatataatatattattaaaagaataattatacatgatctaatttataaaatcaaatttatttttacttgatttcaaaaattatttgatctataataattataattaataaattttatcataaatcatttataaattcaagatctaatttaatattaattataattattaaaagatggagtaagtttccctactccacctattgaatatcatccccgttgggttataatactatcaacccagtttaggaagtttgatacccacaatctgactcatcttagatttacctgagaggtttacccagtcatcacctttcacaagtctttcattagcagcagtggtatacgggttaaccgataaaccgtagcgcatcagaatagcaactttaggctgtaaggattgaggatcaacagaaatcttgatcgaacctgcctgatcagcttctgtgtatggcgtatagaacagagagccaacatgatccatttcacccagatcgtacttgcaaccagtcagcaggtaatcaaacggtgtattggtgtcagtatagacatagtaaccgtttttaagtcgacctgttgctaacgggtgggtttcatcagtttcatgcatccaaccagacgcagacagaacgcttacaacgcgagaagaggccagtacataggtagcttcaaatgaagtcgttctattcatttcctgccccatttcacacactaattgatacaggaaacgacctaaagctggagcatcctttgcagtgtatgcggttgtagcatcgaaaatgccatttgttaccacaccatcaacgttgtaacgatgtgatacgttgatcagagtctggatgatatctttgtttacttcttcgctggcaacagtacccagaacatcttcaatcacattttctgcgttgaattggtttgcttccagatcctgcataagttccacggtcatttcagttttgaatttgcgggaacgaacgttgatattccaacgatccatttcgaaagaagttgtactaatatcttcgctggtttcatattgacttgttggcgcggcttcgcttgccaggcgtaatttattgctgaataatgcgaccataatcgcttcatcaatatcagcacctgtgagagttacgctatcagttacttcgtatacaacatcacttgtcgggtgtttgaaaacttggcctttggtgtaggcagtaccaaccgcaccatttgaaatattatcgcggcttgcatacttaccggaatatgtagcagcgctggaaaacgtcatatcgcctttagggttacgataacgcacaccgaacagagttgcggtaggtaaattagtttcctgaatcgctacaagttcaccgtagatcaggttgtttaccgcacgggtaagagataccagatccggacgggtattagctacgttaattgtttctgttccggttgcctcatcaagaacctttttagacaggccaggcggtagctgtgactgacgcaccagcttgttaattgtgtaaaatttttcactcattttatgttcctgcgttattgacaaacttttctttatttatgtaataaaaaagggaaccttgcggttccctcttggaaaagttggctattacagccctttcacataaaccttgcggaagtatgcgtttttaccgaacatttctttggtaatcataccagaagtgatacggtcggacggagcctgagagcgagagttcgcaaacgggttgatacctacaccgtaacgagttttgaagcccattactggctggaagttcttcggatcagaaccacgcagcggggtcagcgcaacatacggagcgtagtagataccagcatccatttcgttatcgcctttgtaacccacggtgaagtaatcaccacgtgcatactggtcgatgtatactttatacacgccacccagaacaccagcgaatactgctttagtggtgtcaacgttcagagtcttctggagaccttgacctgccggagtgataccgctatcgatacgagccagagcggaaaccacgttacgggaagcgatgatgaagttaccagcaccacgaccagtttgacgtgcgatttcgtttgcttctttgtcgatctgaatcagcagagctttgtagctttcaccagcccaacgagcgccacgaacatcaatcggatcctggaagtcaaacgcaccagctttagagccaacggtctgagtgaaaccagttttaccaacctgtgcggtatagttgatcatgtcaacgatttcgcggttgatttccagcatgatttcggttgccagaatagcagacagttcggcgtcagcgtccataccgtgaacagcgcggagatcctgagccagttctacagagtactgtgctttcagttggcggctacgtgcttcgataacctgcttatcgatacggaagcccatttcgttccacgggttgctagtagaaccgttgaactgttcttgcagttctgctacactggtagccataccgtaagaaatttcagccagagtacctttttcctgttcggcgataacagcagcatccagagcatcgtcggtagaaccagttacagtaaccggagcgccagaaacgttctggaggaacacacgaccagtttcaacgaaatcgtggaacacaatagcgccgtcagcaatagcctgagcagaagtcagtttggtaaagccgttgctcggagccgcgccctgaccggagtacatgctatccggggagaacatcggatggaatgcttctttagcaccggaagccagcggatctttaccgtacactgcgcggagagcgaacacctgaccagtagggccagtcataggctgaacaccgcagatatcgaacgcgatcaggttaggaatcgcacggcgaaccataccgattacagcagggccgatgttggtgatagcaccgcttgagttaccagaagcgattttggttgcgtcgtaaccgtggtcaccagcaatttcagcttccgccaggaaaccaccgaaggattcaacgattttctcgtcgcggtaaaccggatcaacttctgcgtctttttcctgtgcttccataatggcagcaatcagttgttttttggatttggtagcgatatccggtaagccttcctgagactccagaagatcgttccatttttccatcaattcgtttttcttagacattgtttcttaccttttgaaattaagaaagggcttttgccgcttgtacatatttattgatcttggatttctctgccggaacactttcgactaccggaacaaagtcatctttcgtttgcggagtatttacagactcgtcaacgggtttttcagctttggttgctaccatttcaacaattgcgctgagtttattttcgaaggttgcggaatattccagcccttcaatcagagattctactttttcgacctgagattcggtcaaacctttagttttctctgaaactactgcattgcgtttcatttctgaaatttctttggtcagttcctgattcgcttcaaacagggttttaacttcctgctgattctcagtcagttcgtcttccagttcggcgactacatcaacctgttcttccggaatgacaacgttatgttcaaccagaacttctttgaggcccatgatcagggattcaaacaggtcggctttgatgtcacgggaaacggcttctttgttttctttcagccattcttcggaaatgtgcgcaaaatatttatcagcatcttcgtacagcttagtttcgatttcagcggcacgttcagttacctgagcttcgaccagttcgtcggaacgttccgcgatctgggtaatgtgggattcagcgagttttgcagcgccagcttttacagcttgttcgaatacagtggtgaatgtcgctttcacgtcatcagaaagttcaactgattcgaaaatgctgtctaactcgaccggagtatccaggttctgggcttccgccagcagttgttctttaagcatttttgattttcctgttgttttgtttaatgtatttatagacctttcaaacgctcggacaatgccagaaaagcgtcatcagcactattattctcaacaagcggtttgctttgctgattttccactataggcttaacatatgcatcaggtgcgcttggcccccagacgacatcaacgcctacagctaatttaaagcccttttgtacaacgccgtagcctttgccggaatcggagagcttacctaatccacgggaagaaacaccaggaacccaaccagcacgaatcaacgccgccagtttgtcaccatcaccaccgtcgccttcaacaacaacagcgcggccccaaacatcgttacccttccaccacaatttttcaatcaggatgcaagcatttcgcggatccacattcgggcgcggagggtgattcatttcacctaatgcttgacgggtgttaacttgagttctaatataatcgttaactgcttcttcaagtacgtttttaggatacaaacgacggttacggttaaccttttcggcttgaaggaaaataccttcgatccgcaatttaccgtcttttgattccccaacagattctaaaatagattctgaaacgtcaccgcaaggtaaaccccattcttcgattaaaagcatatcgccgttttcgttgatttgggattcattcatatttatagccccagtgcagcacgtttacgcaatgctttcttgcgcttacgttgtgcgcgagtagcaattgacgggttagcacgttttgttttgagagcacgacgcgcgatctggcgacgttgggatttagttaatccggtagtctgatacgcattacgctcacgggttttcctgtctttgaggcgttctacgttgccacgggaatcaacatgcttgacaattacctcatcaagtgttaaaccttcaacaaccgccatcatagcaagggctaaatttggttcggtgaccgccaaattttcgatgattttaaccgtgccttcatcgatacccagaatatctacacgggctttcgcttcgtctaaatgttcctggagatcttcggcggtgatttcgatgtcaagttgcatttacacacctcactcatcatctttatcggatttatcatcctcggctggctttttatcgcccttttcgtcatctttatcagcgccttcgtcgtctttttctttgtcttcttcgccttcgatgcgtacagcttcggcaagttcaacgcgtaattcgtgacgaagcgcttctgtgcggtcttccatgatggagtaaaaagtttttttagcttccaccagattaccgcttttgattgcttcgataaattctttcatcaaaagttttcctcttccgcttctggatttttaaaacgttcttcttttgattcttcttctatctgtttggcttcgctttgaatttcctcatcagacatccggagaacttctttcattacgtatttatgggagatatatttgccgaccaccccttcaagttggcccatcaggtttaaacggcgttccaaaatctcaatatctttgatttcggaatagtaagaatcttgctgatatacaaaagcaatcttacttacgttttcatcccattcatcttctgtaatgattttcttcgcgatcaagttagtttttaacggatccgcaagaacagggttgaattgaatttgcaattcgcgaataaatttgctaaagttcaattcgtcgcgggtaataccgccatcgttacccaactggataccgccatcatcgcgaggcatacggcttaacggaatacgtaacgcttcatacagcttacggttaaaccatttaacatcgtcgatatcagagaaggcagtgccaccgggaagcgttgaaacttcggtaactgctttaccatcacgacgcatcagccaatagtcctctgtcattgacaggttattttgctgattcttaactttaccagtgctcgcgtcatatacaacacggttttttaagccctgtgcaatgttatttacgtactgtgtagctttagggccacccatctgacctacgtcgatatagaacacacgacgttcaggcgcacgggtaatgcggtaaatcaccatagcatcttccagcaaacgcaactggttagctggcttgacagcgcggtgcaggtagcctataatgttgttgtcgcaatcttcaaggccgctatgagcgtaaacaatcgcagagcgaggaatttttaccttgtcattgtgactataaatctgtccgttgtagctataaccgtttttcggtgcggtgtatacgaagtattcacgatagccacggaaaattttaaccccaccgggtagggtttctgtaaccgattctcggatcagttccatgcaacggggatctaactggcgcaattctttgatgccgtcagcttcatttttgtgcatgattttatggaaatagatacgcgaatcaacataccaatcacggaataaacgagatcctcggttatcgaaatcgtgaatattcattacggtatcgagttcttccatgatcttatcttggatatttttactaaaattcgttttagtaagatccatcgtaacaatatcttttccttgttcattaacaatcgcttcgttaatgatttcagaaacagcgttttccacttccggatatgtcatgataccacggtatgtatttattagctgtgttttgttctgaattcgcggatcctgtccggaatagaactgttggaacacagaagaataacgctggtttgataagtccgtttcgatttcgtgcgccccatcgttatttttcggaggcgcaatcgaacctgtatcatcttttaattgggcttcaaattccatttcatcctgtttggcgaaatttttgaaaaaccctaacacattgtctaatccaaaaaagttcatttacaactccgaaaaataatgataaggggtattgctacccctgtatttatagcgtttaaacccaccagtctagcgcgaaagtacactcaaaagtgctcacttcgttgttgctatcccagtctaaagtaacctctcccacgttggtcgggaacaggccataaatggtatgttcggcggttacttcgtcgttacggtttttctgtttaaccgtagcggtttttttgtagtttgcagggatatcccctgtaatgtcttcacccataccatgcagcatgtttgaccatgctacgattgcatcacgggttgtgtgtgcatcgtcgttatataccgtgattgtccagtcatcataggtacggtcaccagcaacgttaattttgcggttcatgtaacctaccggaactttttcaacggtagacgctggcatagtagcggctttacattttaatttaaagtttttgcccaggtacgggatctctacttcgaacaggttcggacgtgcgaaatcaccggattcaaaggcgcgtacaatatcagtaagcattttctaacctctatgtgtatttataggggcttttcagccccttacatgttatactgacgttgatccaatcaactcatcgaaatccgcaccagttgaggttgctacgaagttcagtgtgatgtagttgatagaacgtgctggtttgacgtagattgatgcaataaactcattgcgatcaataacatccggcgtgttgttcgtagtgtcacaaaccacacggtaatcgtatacaccgcccagagcgcgaacgttagacatatactgtcctgcatccatacggaaggaagaacgagtgaaatcatcgttattctcaaacagtttatattttgcgttatcgccaatgtctttcttgatcatgttgaacaagcgacgaacgttgatacggtcaaacgggcttggaacagtcgttgcggttttatcaccgtacagaatgtatccagcaccaccagagaaaccagtaaccgcgttaatctgtacctggtacatagaatcgcgatgcgcgttagtcggttcgatagccagtttgatgcagttacgcagttgaccacggttgtagccagccggagacatccacggttgcgatacctgatcggtataaacacagaggccagccatatcacccgcgagcgggatccaacggttaacatcgttgtatttatcatactggaacttatagttaccgtcgatgaacgcataacttgaacttacgttcatgttgttatcaactggggtagtattaccgattttgtagcctgtacgccattctacgaggttatcaacggcctgagccagtgggatattaaccagagcagaacgcggcggagaaacgaatacaacgcaatctgaacgggtttcaccgatagacacagcgtgtttctgtacagtagacgaaatttcggcagtttcgccagcacaagcaccagcaatcagcagaggaacatgcagagattcacgatctgcgaacatatcccaaccagccatgagttcatcagcgcctacagtggagtttgcagaagtaccgccgcccagttccagaacgccggagaatccgacaggccagtttagggacgtaccatacagatactgcgaaccaccgtttgcaaagaaatcatccatgtagatcgttgaaccgtagatatctttatcacctttagcggttgacacgataaacgtttcttggataataccaccacggcgaacgataaacgcgtattggttatcattctgagggccaaagttcatcgaactgcgaccgctgtttttaccagacttaccagaaggataagacttaatgacagccgaagaatcgtatgcagctttagacagaatttcaaccgttacggtgctacccatttcgccaggataaattgcaataacagacggtagcttgtatttggtgcaaagtttctggaaagcagttgcctgaatagtttcttttgcggtgtcaaggttgagcagagtaatacccggatcaacttctacgccgtcgattgtaatcgtagcagaaacaccagaagaactggaaacgatttctgtagtccagccactagacagatccggatatacaccaacctgtttagcgtgtgcgatgatcttagtgctcggaatgaacacagacaggactttaccctgatcatcaacgctggtaacaacaccatcttcttcaataacaacgttattgtgtttaactttgatctgatcgtctactgcatagttagaaccagcagcggtgatcgtggttttgatctgattatagatcgcggttgcgttttttgcggcttctttatcgacgacacgaacaacacgcagatcctgaccgaactgtaaaaagtttacagcgttcatgaaataatcagcggtgtcattgtctggggagccaaaatagtttaccagttcgacttcgttagaaatctgacggatctggtaagctggcccccatgaaaatttaccaacaatagcagcacgaccagttgaatttcgaacaacggtagattgtaccgatgtttctttagtttcaatgcctggagagattaaagccattattaagtttcctctaaatttatataaacgaaataccgtgttggccgacagatattgtttcgtcgccactcgttacgataacaggacataacatatcttcataaagcagttcgcgctcacgtgcgaatacctcatttgccaaccgcaaatcgtctttctcgcaaaattctgcgaatttcatttgtgttgttagccatgcaaagcaaaccagcgccataacgagatcgtcatggaaaccttcttccgcagcccacgaaacacctttttctgagaaagtacgaaattcaagtattgtctttttgttatttatgatgagtttatctttctctatcaagtcttttagggttgagcatccaatcgctttcgatcgtttactttgtttcatccccaaatcattatagctatcacaaataacgttatcgtaatccaactcagaaaacaaagatttagccactgagtggcctgtgctatttagctcgatataaacccatgcttcgttgtacatcataagataacgtaacaggacatcaggcaaaataaggtgcgatgttttgtttgaatgatatacagcaacctgttcaaacggcatagatgtaatatctataatatgcatcgcgtgatagtcctgaccgcgcccttcggctgggtcgagtaccgcaatatatttatgtccctctacaggagctttatactgataaaaattagtttccgtttcatcagtatcaacccatgagagttttgacaatttccagccagcgatcagggttccgttggttcccatgaattcagcacaatgttcctgtaaaaatgcttctttacttgaactggcgatcatcttcgaagaccatgaatagccgtcatcaaatacgccatcatcaccgtctgtatacaaacgctctttaaccgatgtccagatcgccgtgtatggtacgaagccggattttccttctatagcagcgttccagatatcatagaagtggttaagcccgttaggtgtcgttgtgataaggattttcgatttacgaccagaagaaattactggctgaatcgctaaccacgcatcaataaagtttggaataaacgcacattcgtcaatgtagatcattgcgaaggagttaccacgcaccgcatcgggagaagatgcaaacgcaccaattttacatttgttatcaagttcaatagaacctttgttccattcaacgataccaggttgcaagaaatcggggagaagttcaatcgcctgttttgtacgatccagaacttccgcagacatagaggctttatgagccaaaacgccaacatatttatcctcgttgaaacacacaaagtgtgcaaggaagatagcaacaacggttgttttacccaactggcgagacaggttacaggcaaccatacggtttttatgcatttcgatcagcatttcgcgctgatagtcacgcaactgaaccttaattgtaccatagtcaatgtgggtgatcgcgcaatatgtttcagcaaaataaacaatatcatcacgacatttaacccactccatcaacatctgttgcgtccatttcgtttggatgtacgcgcgtttcaggtttgggtttccgttatatcgagttttcttgtttcctttgtttttatacgtcgcaaagtttgaactgtcttttgcttgaatatcaactttatggataccgttaatttttaggtaatcactaaactttgtcggataccattttttatcatgttcgctttgcgtccactccatcccaaattcatcaattttctttttcagataatcgggatgcattaatccgattgggtgatctgattccttactcggatcgatcgtcggttccatttccatcagggtttacctctaccgcttcaccattaatgaagccttcttttggttcgtatgcactaccatatttctgcattaattccgtaggggaaccaacaaatacagttgcattctctatgttcatttcattaccgccgccattacctttttcagatcctggttttgttgtttcttcggtaatttctcgcatttctttatgaattttcatcaatccctggttagaattgtttaactgattcatcagggttgtaaaaacttcaacgtgtctcggagattcagagtttttagcgttatgcaaggcaatttgtgccatatccatgatcatctgattcatgtaatgcgcggttttacgcgcaagtgcatagtcttcctctaaatccggttttcgatctgctgggtgtgactcgacatcaacgagttcgagtttttcatatacaaccatttcttccccagtttcagcaccagggagattttcaagatcaagtagttgttttacgctaaattcttccattattggcccctcggtttaggaggttgatcgccgctaggaattgggatatcattagcatacgttttaatgtattcttctcccgtgtaatcctgtataggcatatcaaccggatccacctgagcatcaacggattcgaaattgtctttgtccaacgggttcatattggaaaagaaatccgtgtatactgttctgatctcgcctttaatctcgttaacaggcggatacaggtagccctgtaattcaaacattaaagaccattcaatgtgtcgccgtgtcgttgcatcaccttcaaaagatgtatcaggggaaacagattgcagagatattttaatatctcggtctattttaatgtcgtttttatgtaattctgtaatacgacagttgaaatgcggctggaagtatggcagtatctgttctatgatctgaaacacatcatcttcgtaacgggtatacactcccagttcgaacatgagacgatacggagcagggttaaactgcgttactgtttttccaggtgcgcgtaactgcgtcattttttggtttaccgcgatccccgttttacgaattgcgttatactgcaaatcaacgagggatagattcatacgcggtaaaattgtttccgttttagcaacattttcctgactgtatgcatagttcagcttgttcatggatgccaggaatttttcttttgatgcgtaggtaatcggaaccttgataaatttttcttgttcgccgcgaacgcgtttaacttgcacgtgattgaaaagacaacccatcaagacaatataatttcgcagcgaactattataccagtagccaaacattttctttttcctgtatgggttaaagcgggtataagatttctcctataccctacatgtatagggtttcccctggttatatttatgggaactgtgcgaacggtgatccgcgcccgttaacaacatcaaacgattcaatgaattcatcaccttcatcttcaaaggcttgatcttcttcgtattgttcaatattggtatccgccaacccatcaagatttcgaataggttcgagatccagatcggcatcgggggaaaggttaatcccttcatttcgttgcagtttaggatccaattcttcaccagtatagataaatttaacgaggttgattttacgttgaggacgatcgccgaactggaagaacgggtcaaactcaatccatgtaatttcaaacaggctgttatccatagggaaataaatcaaatctcccagaacagggatcccgccatcagtttgatgtgcaaataaacgaggattgatcacaagtgtcatttcgtcgtttgacatcataccgaatttactgtaaaagtctctctgcccttcgtagtttgcatacgaatcgatgtatgctgcaattttccacgattttgtaaacttcgattcacggtcttcgcccaaaattttatcaatattaacaaattctcgacggacgtaatacatatccggagatttcatttgaattgcttcggctgttagtgaatcatgcaactgttgagtagggttatacttgtaccagttaacatacttattagtaacttctgtttttaggttattgtctacaccttccccagattccagttgtgcaaataagttttcatcccaatcacgcatagttccatccctcccatttcttagagtttattctgtgaaatacagaattttttgttatgccgtagtggtctccgcattctttcaatgttgggtattcaacgccatcaacgataacttttcttgcagcgggatttttatcaccagaaacatcatggtgttttctatttcttgtcattatacgggtggcttcttgtctatttttaaggccaatttcgctatattttctatttttggcaatcatagacattttatctctagattctttacttcgttttgaacctatatttgggttttttgatggatcataaaaagaaactccgccttttcctccccgtactagattagcacaactggaataataatccattatctcatcaactaataattcttctgcttctgctagtaattctctgttgggaaattctttagaccatcgaatgcatttaatacaagaatggctatactttttaatagctctctttatatatgtccctgatcctgtatatgggtcattatgtggattatcataaggggaatgacgcttccccccataaatttttaatccagtagaagtttcaaaaacaacaagatacaatctatagtgcattttttcctccttacatcatcaacactggaagtgcatcagacagtaacagaagttcttgacggaggttttctttttcttgcatagcttcctgaatcagtcgggttccatccggagcaacaccaccaggtaattgcataccctgaaacttagccagcacctgaccgtttacctctttaacaagagcagttgcgtaatctttcacccaacggttgttatacgcagaggatgaaccctgaacgcttgtaccttgaccagccttcacaccgcctgagacagctttgtaggggttattgtatatatctgctatagttggcttatcttcgccatcagaacccactgtagcgtatccagcgacgttaccgaccatactgggtacatcaacaaaggatctgatcattgcttcgataacaacaatatcaccatctttaacggttccgtatactgcaaactgtcctgtgtcgtcgttataccagtaatccggaagcggagacaggagatcttgcattgaccgctgatagctcatcatctgggtaaaatagcccatatccgcgccgtatgcgttcattccgtaggtacgtgatgcacaaccaccaccgcccagagaaccaccagtaaggcccatcaggaaatcagtaaaccacggataaaccgcagtaccatccatcgatacaagggaacccatgttagtacgcaatactttagtaattgcgaaaatgtgttctttactcagatcgaaaatatttttcgggttatccggccccagggtaagaatgatataccctttgttagatccattgtaatgatattctgcatataggtctaatgctcgttgaatgcagtcataaacctgatctgttgtcacttcgattttgacgatcggagcacctaagcggcgcagaatttcatcttttaattgtgctgggttgttcgtaatcataaagatcctcaaaaggggccgaagccccttgttaatcgttaagcgacagtgatcgccagttcatcagaaacgatgactttatggcttgcatcagttaccgttactttgtaggttccggaatcagaaggctgtagcgaatcaatggtaaatgtgttagcattagtaccaacatttacgccgttcttcgtccactgataagacagcggagaaacgccaccagtcatagttacgcttagagacaatggatcgccagtagtgtattcagtatcaccagttaggttagtaccgaatgacagaggcgggtttttgctctcataacggagatcagcgtcagcttctttgatgtacagagccagtttagcattcagatcttcgatagttacgcgatctgcaagtgcctgtgcaatgttcaacgcttctaaatcctcaacacgtttattaaggtcggcaatcagtgcataaatgccagtttcgttaccttctgcgttatcgcctacctgagtgaacaggttgcgggttgtctttttcaaaccagcgcgagtaacaggatcggaactaacaccatcaccatagatttctttgttaatctgctggctagttgcaacgaggccactagaagagttacctacaatgccttgcagttcccagagtgcgctagtgttggtgcgcaattcaccctcaacaacactcaaacggcctttgatactggtaggatctgaatcttcaccaacgtcaccagttaagatcgcaacttgtccctgcaatccatcatcgccggattcacccagaatcatttccatatccatcaatctgcgtttagtttccgcaatatcataacggatactaccctgagcagaagccgtaccgatttgaccgttaatggttgcaatttgtgcagtgataccagttaccggatcattgatttgtgtagccagagaactaacggagttttccagactgttcacacgatcgttaatggaactggttgaacttgacgtgcgaccgatataactattaatcgcatcaagttcattttgcattacaatagaaccatcctcaaggatcttgattcgcgcatagattgatcgggttgtggcaagaccagaatcacccatttcagcacgaagttcttttacctcttctgtcagttgtcctacttcggaaagcgcccaatcatcttccagtttggttatgcgagtttcctgcatagaaatagcacgttggttactcagtacgcggtatttaaggccagtaccagtagaagaggggtcaacatcaccatcaacgttaaatccaggatatgaaccaacttctttcttaatgtaaatgatatcattacgaattgtgcggtgtttaggatctttttctggatcgtattcaccaatttcatcgttttgagcatttacagaaagggttaactgtgctaccttgttctgtgtttgggtgttagataaagttaatgcccgaacatcctgatccaactggttaacttttttgattacgctctcatcaccaatagcatcaatgttttcagtaatcaagttaacctgatcgattacttcgttgattttatcattatgggtgatggtattttgttctaactgaaccgcgttctgctggatgtttacaccagttcggttaagactaccagtgtttgacactttatctggcgaaccgtccagagtttcaccgtttttgatccaaataatcttcgtttgagtcgtggcgtcatctgggacgccatcaacaaacgggatcttcggcaacgggtttaatttgtcgatgatcatttaataacctctattgagtacgaattacgtagtttaatgcgatgtttttcatgcgggtttcttccccacccacaccagtggctttagttatagaagcatcaaatacgcgagcgctttggtcattcttttcggcgcttttcagttcgtaaactgcttgccatttaggaatattaccgccgttctggtagataagctgtaatgggtgttcatgccagcccaacatatcgccttcatatgtaccatacccacgattagggtttagtccacgcccacggtcatgaccacgtactgcaacgcctcgacaatctggaaggttaaaccaatcaccgccaccaccaaatgtataacctatacgctcaaaaagtaacggatagttatttttattcagtgagcgaccatcacaaatatacaaactaccgtggtcagtctgaaaaccagtcatgacaatagcacctactgggaaatgccaatcaagatctgtccacgtctgatatttgttgttatatattgcgctattctcataaagagaaccgttaattaccgcatttcgatcactaggtaataccgcagcgtttgaagaaagtgcagtgtttgccacataaccaacagttgttgctaatttgacaacaccgaactgagatccagttgcacgggtattgattaattttttcgcagtaatcgctttggtgtcatcagtacccgcgtttgcttctgcctgtgatgcgatacgaataacgcccaggttgctttcagttgcagttaaacgaataaacgtataaggtgaaattgcatacccttcacggatcgtaccagcctgaacctgtgcaactgttgccagttgtaccaaaccttgcgagctttcggtcgcgcttgactgaaccggaaccagggacgcgatcgcttgcttgactttaagcggagtcatagttacagtgttatctgtaccagcaaccgcctgtgcagtggtagcaattttagaagaaccccaaaccgattctgtacctttgcggttattgaacacatagttcagagatcgcggagtaatagacgatgcatcgttagttacggttgtggattccgcatcagtcgaatacttcgtataaccccatacggtttgtgatgctttagggttctgcatacgatatgctaacagtttcggagtaacaatcttattgttatccgtgccagcgtcaatatcagcttcggttgcgatctgagcaataccacgaacagaagttgttgcgataggaagcccagtatcagtacgcgcccaactacctattttttccaacgcatcttgtacgttggttatggtatcaggccaatcagtacctgttgggtcaaatgtcacgtaaatggatttatcacttacgtggttgattgtattgttactcatgtgttatccttatgcaattcgtttgaagtaatacacggttacttgcggagtaacatcaggtaagaaaccagaacccaacttaacccatgaaccatagccattttttgcggctacgtcgatagttccgatttgacgaataccgttttctgagatatttgttgccgggtgcggaacactatcaataaatcgacattcaaggatcgtaccatcaacacctttacggttaacttctgcgaaatatttttccgctgcaacgaattcagtaaatttgttgtatgccgtttcacaaacagttgcggcgttagtcccattatcaaagatgaaaggaaagccgtacacgtgaactacagcctgttcttggtctgaatcgatgttctgtacaataccatcaaaagaaacgctctcaacctgctgtacagcgattggaggggcatcctcagtcatggtaacaacgccgttaatcgggatttgctcgataagcgtatacaggtcatcaattgcggattgtacgtttccatacagaacaccgcgttttgtttggtcaatgtttggttcgccgatcgaacgtttaccgccgatcagaggcaacttaccataagtatcatactgtaagtaatctgcttctttagagaggacgcgagcgccctcccttgtttttgaaatatttttgtaagccattatgcaacccttatccagcgatgtgcagtcatatacggtggaatagttttgattttatcaggtaatgtgttaccatgattcactttcaatgtatcctcacggtatttagtgtatccagggccagaagcatcaggatctaactgacaaccaccaatgatcacagcaccattttcatcagcaataagaactttatcttttgatacaagttcaggaacgttgatgattttgatttctgtaccacgatcgccaccagtaccacctgccgtatgactcggttgaccaccactatctaaatcattattgtttaatgcgaaatcaggatccgttgcatttgatgtccagccagccaggaaataaccttctgcgtaacgtttccaaccaccaaatcccatataatcagcagggtttgccgggttgtgtgcgttttcatagatggttccgatcgggtggataatatcaaacatagcctgaatatccagaatacgcccctgataggtttcccctgtattacgcattgttttctgagaagggttattataatcggtatattcgatacggttcgtcaatataacttcttcttcgttattgagataaaccttatcagctttttctttaataccgccagttccttcccaatccatcagagtaccaatatcattgttaaaccaacggatcgttacaacgtcgccggattccagttcctgagcaaacttgattgaagtcactacagaatcagtgaatactaaactataatcctgtcctgacggaacccatacaccagagttaccaacacacgtactttcatcaacaccttccgcaccttcacaggaaaacgccggatagtcagcgtcaccgcctttaaccagttgtttaccgttgagaagcagttcaaacgagttagggttaatcaacacgcgagggttaacaccaaattcagcaggtgtaaactcttttttggttgccagatcacctacccactgttcaccgggaacggtttccagagaagtatcaccagtctgatacatgcgcatcacatacgcttcatagctcgaacgccatgttgctaacccatctagataggtaacaaattgaagcgtgtcaccagcgttacacgggtttttaagacgtactgaattaccatcaagtgcaaccagttcaccaggagcagagccaatcgacccatagtctgagttatcagcattgaatccgtctttctcatcgatgaacagcaagttaccgcgatagtaaacttcgaacgattgcaggttgtattcattaccaacaccgaatacgttagggaagtcagtttgtccctgagtagcaatatacgtttcttttgctactgttgccagatccgaagttgtgattttgtcaatctgtttgttttcgacgtattcccaacggcccggagaacaatacaccaattccacatccataaaatctttaaacagatctttaggagttggggaacctttgatagtatcaccagttgcggggatcagtctaacgttgttggtagcccaacgcgaccacacatcacgcagacgaataaccttgttataatcgcctacgccgcctttcgggaggtttacggtgattttgtttgcactggtattcaacgcccatgattcaccaaattttggtgatagcgtcgtacccgcaaaagttttccaggcacctgctggatgggggatctcaccatcccccagcatgttatacaattctgtaaagttgttgttagtcttttgaccacctcgacgcaggtaatcgcctgtaccatcgtctacaatctgacctattaaaatttcttgtttcatgacgcgatccctgatttaatcgtatctattgctttaatcgtgaatttaattcgatcttctttgatcgcttgcacgttagcgtatacgacatcaccagcaccgacagtaaagtttaatgtaaacatttcatcttcactgtttttcaaaatagcgtattccgttgaataaatcgttttgtgtacacgatccacggtcattaaaacttctgccattttggtaactgtaccagctaagttttctgcgtatacaagcaccttagccccgctaaattcgctatatccgaacataggaatagcagtcgggtttgctttcagtacaagcgccgtagtgtcaacaggcatcgttttagaaccgaacatagattctacagaataatcccattttgttaccgcaccttcttttttggtacaccagatttttacaaaggtgtaaggtgacgtgatatacaactggtctgcaacccccgcgatagtatccccaacttgaggacgaaacgcgataggacgatcaacagagacactacccgtactatttatgaagtagcaaccttcgccaaccttaccagaaggaagaacaacggtaatcgaacctgttgaagtatctatgtcgtgcagggaacccagttcgatcggtgtgcttgaatagtaagtgcgtggtagtttctgatagtatccggtagcatggatcaccatgttaccgacaccttcgtttgcagacagcatacgcacatcaccaaacgcattataaacgttggtgatcatttcgttcagtttaacaccaccatcataaagcgggtcgcctgttgatgggttgccgatttcaccgacatcaattagtttttttgctgtttggtaagccattgtttttccttagaattcgaatacaatactcacttcctcagtctgatcaagggagcgaataataggttgtctgttttccatgtaaatcatacgtccggaatcaggttcaagcgcgttagcattatagtaatcaccagttgctttcttttcaggctcggtcgggcttgcctttttaatcaacgggtttacaataatacttatctgacggaaccctttgttaccaggaagcgtagattgcgggaagaaaagagaatccatgtatgcacgaaaacgcattgaattcaccttcaaccgatacactagatcgtattgtcctggataccattgaatcacgttatcataaccccaacgtaccggatcctcttccagttcgccagggaaaggaactacgatatgttcatttgtacagcggttgatcacgacatctggcgggattgtgtagaggtattcccatttataaccgtctcccatgtcgatcccgttagcttctccgcgtggaggttcactagattcatgagacggactccagataccgccgatcctgatacattcaagttttccggtaatgctcgaaatggagcaagaaccgatatcaggaacatcaaccacacgataaaccatccaacctttacccggatcagtacggttataaggtgcggtgtttacaacaacaatatcgttaaagtaaaagattttcgggtttggataacgagtatcaccccagtctttacgtggtaaaattgcatctatcatatcaccaggaactttagtagccccgatcatatgcgtccacatatcactaacaccatcggtgctatcatttggatatggaggggcgaagttagggtcggattcgttatccgaccacgattcagttcgtccaatagacatgtaaatcgtgtttagatcggcggcatcgccgatcatatctttgaagttcatcaagttttcggttcggaattttgcagtaattaccgaccgatacaagttttgttgtgccatttaatttcctaccttaatctgtgatggaggatttggatcacgtgggtttcctgcatcatctttcagtcgtttatccaccaaattacggaactgtgaatatttaacgcctgagcaatcgaacaacggactttgatcgaaccgtcgcgcagaaggaagaacaccgttaagaggtttttcttcaatgtcatattccggaggtacatcaaaaggttcccccgctcgcgggtgtgcggtgtacagaggttcaccagtaaccaggtcgaattgttggtttccgttaccgtccatactcgcaatgcgatcaggccagaacttaggataaccactatcgaaacggtagtttctcagaatatcaatgattgtctcgttatgagtcattgacaaaccagagttgatgaatactgttaacatcgtgatacccataaagccgaatcctaccggatgaacaaatctcaatacgtcatccttataacgggaagtcggtagatttgaacgaattttcatcacatagtaagatcgtccacggttgatatagtcgatcgagttgttagccatttgtttaccacgaacaccacgaattaccattccggtgaaattggttttttctgacttgacaacctgcccttcgataaagttaccttgagcattatgcagagtcattgaccaacgcaattgaccattttcatagtcacgttcgatgtatgtaacgttagcgcgtccagttggtgtatagatcgtccggcctacgatatcctgactgatatttgttgaactaaccaaaatatcatattcgagactgttggagctttcgatctcaacggaaacatcttcgttatacagcaatttaaacaggaacgtataacttgcttcgatcccttttgttgaatagaaatcgcttgcacgtgattcaaaaaatctaaccactgcctcacgtttggttttatccaggtaaatgttacggcggttaatttcagaccacaaatattcaacgttgtttttctctctcggatacttgttccggatgaggttcagcaatttgttatagtaactgttgcttcccaacgaaatgtattgcagatagtattcaccaaatttttcgaactgttggttgtccagatagctttgcggagcaaaacgagtgatcatgtgactcagatcagggtcgattagtccaggttcaatatccggcgtgtatgggttttcacgttcctgattaaccagacttgccaccattaaagtgttatcaggtttccagaaaatagtgagttcatcccttgcacggtatgacagttcatagaatccaataatcctaccacctgagcgatacaacagaacaccgtttgtgtacttcgtaaaaccagtaaacttgatattattcaagtagatagtaactgttcctttgtcccaaacttcatggtttacacgaatcgttgacgcaggagacgcgctatcagtaaccagagtatacagggtttccggataaaccaccagaggacggttatcattggtgatccatgtgctaaccttatcgcggaaatgccagctaaagtttgcttcattgtagtactcttgcggcccaaagttccacactgtaggatcgttctgatttgctcgaactgtagcaaagttaatcgaaatgctcgcagtataaccaggaacaagatcgtatttcaccgctgaatgcacatcttccggatacttttcaaccagatctggatctggcaaagtgcctggatatttgtagttaccaacagaaatgtaaacttcatcgccattggttgacatattggtatattcatgagtgatataaaaacgttcctcttcggttttaccataaacacgggtaaacgtctttgcagtctcatcccacagataaacgccagcatcgtttgatgggatcacgttagctttgacagtcggatccatcatcgccgttttaacttcaccagttaccagaacgtacagacggtcattcagcacgtccatttttttaacaacaattttatcatttcctggtacgatggtatatgaaacttcatcaaaaatacgttcgccgaaggtcggcgaaccaggatcagtatcaattggtgtgttacgtaacgcaatacggcgcataacgttcttagcagccacgtagagccaatcactagaacaagccatagcttcggcatacttcgacactccgcccggtagacgcgcatacgtgttgtatgaatcaacatcaaaatctaaccctgactggttccccagcttcgcaaacgttacatcatcagcagaaaaacgaacttcatcagaagaccaacgaatatctgttgacgtgcgtccgtaaaatatgcgatcgtatcctaacacatacgtagtgttagcgctttgataagcaacggtacgggaaaccggattgcctacgcgatcgtttaatgctttgtagtaataccacgtttggcctttgtcatttgacactttagccatattctgaaaacgttcaaacaggtaaagcaatccgtttgagtataccaggaacgtgcgatctatatcattacaaacatgttcgatgtgatcttgaatttcgtgatagctttcttgtttcaggatcttatcgctgatctggcttacatcagaatacaggggagagtatacaaaatcctcaaccatcagagaagccataataacatcatcgttaaaatcgacgtaatcacgattgtttttggcgaatttttcattgataaacgaatcagcaggggtgaattcacgcatggttgtatatgcgtaggcgttctcatcaaacgtccataattcatcgctgatcacccaatcagaaggttcaaacccttcatgagttgtttgaatacggaatttataacgtgtatttggggcaacctgatcgctaaaccattcgttttcgtagctatagcccaattgactccagattaaattttcatctgggataatagttccgtccatatcacggctacgggccaattcaaccacataatagaaatccatgccaacatcatcccatttaaggtaaacaaagttagcagccagcttatcaacgcgcaaactcgtaatcgaaggcgctttaatcattatatttctccaaatttgcggttatgtatatcacgtatttataaaaagaaaaacccctatccgaagacaggggttaaagattattgactgataggattcatagtcaatgtggtatattgaggacgcaggtcattttcaaacacgatcaacgaaccatcgcgagtaaaaatggtttcttcgagaggttttgcatttagctcgatataagcagcgctgaaactatcggcggatacgttcagaacgcccaggtcaaagctaatgaaatcggtgtaatgagaaaccgatccaacttcgtaatatttattacgggttcctgcatctgttaatttttcaaagtcatcgcctatataagcagcgatcgaaatatccccatccttgaacgggcctattacaatttttgcgttaccatcctgatccatttccgtagaagcataacgaacatcataactttcgtcttgttcgttggtgaacttgaacgtactggaaatgattgatttagattccacctggttcaagaaatgaatcccagacataggggcgctgtaatagttgtcaatttcacggagcaatttaatatctgcttccgaaccgataatagaagtatcagactgatcgacataagtcaacatcttagatacactgaaagatttgttgaaaatttcaacgttgtcagtatagtaagagtcgatcgacgaaataacctgaccgcgtaaccattcctctgattccgtcaacttactgatatcatacgttactttgacagattgaacaatatacagatagttaggatccataatcgacggggtgattgtcgcgaggttatatttcgaaagatacgtttgcatatcttctttctgtaccgatgttaggcgcaaacctgactttggtttaacagaaatgaaagcataaccaggtttttcattatcagtaaagcactgtaccgcctggatgatagaaccaaatctgtgagacaggaatgattcataatccgatgcagttacacaacggcgttgtgtttcacgcataacaggggccagttctcgaatacgctcgatatcttccgggtcaccaccaccatcagcaccgacataatcaggggtgttggttgggttctctttaatcgccgtgatgctaatattggttaatgtatcgacatagataaaatcttttgcaccgttagccgcttccccatcggttgacaggtactcaataacgatagtcgaaccattagcaggtttcaagcccccgatatattcagcggttagtgcgccaccagccacttgttgacttgcttcaccttcaccgaaataaacttcggtatgtccatcaacagtttcacgcatgtagtaaatcgtgcttgcgcctgttgcgtttacaatgctttcgtttgtccagtcttcccattgtgcgccgtttacagttaaacgtacctgactacggtcaatgtttggatctcggatcaagatactcgaaccgtcataaattagttcagtacgaactaaacggccttgcaccaagttcagcattgatgtatagttgttattactatcacgaacgataacaacgtcatctgatacaacaaaagaataactgtctgtattctttacagtaccgatgaattttgtaccgcgcgggatacggatcgatgttggggtcagtgggttagcagccgtaatcataactgctgtgcttgcagccgtgcgcgaatctggcatatatcccagttcttgagcagactgtacaacagaactacgcaacgcagccgtgcgaataaacgattcaaatagagccgtgttacccatctgctgaatataaagagtagcatacgacagaaggtcgatcagtacgttcattcgtgagccggaaaaatcgtaatccttaaactcttcttgtccacccagccaatcaatcagatccgatttaatttcttcgaaagtacccccgataaagatatcggggatttggttaatctgttttttgacagtcttagtcttagcagtagccattattataaattcctcttgatcattcgactatttagtatttcagtactggaacacatacactaatcgaaccaaagttgattgctaatcctatgagagacagcaatttattcacatattgtgtgactttactcaacgccaacgtacaaatttggttatagattactttgcagtgatctttaaacgagcgcgaactatcaatgaaatttttgtacagagactgagcaccagtaatcgcattttcatatgacttgagaagatcgtcaaatgcgacaccacagaagcctaaaaactcgtttattgtactcatcaaaggcaatttctttaattcttccatcgccatgctgtatgtatctttcattgcatcttgtagagatccaatctgttcctgtatagcgtcatacgcggcctgtgttgcagctacagcagcgtttgcagcatccaatgcagattgataagccgctgttgcttcgtttgttacagcgccccacatccagtttaagtactggttgaattttctctgaattgtatcacgttcgaaaatctgactttttaacgttttgtaaagttcctgtccctgttcataaagccctcggatctgttcgtatgactcatcaacaaaagccttgactttttcctgtgcttgttgatacaaatccattgcagtgaatccagggaagttaccgcccagaattatatcaagtggtttgatttgcatcatgatgttacggatagccagcaccgcagaccataacgggtttgggacttccggagggatagcccatgtttgcatgatccgaccgtataagtcgattaatgcaacgcaaccgttttggaacatcgttaaacaccaatcaaataacgcgctacacgcatccacaaggtcgcgagcgccagctttgacatattccacagaataattgtatgcgcttcctatggccccgtatattgcgtttatgacggtttcatatgtttgttgtccggatttgatgattgcattaaacgcatctttcaaagtctgaacagaattatcaccaaacaccagatcgtaaatgttgatcgcaacacctaagatggttacttgaggcaagaactgattaatcaatccccatgcaccaccgataatgttaaatgcagcgctaatcacttgtctgaaaactttcatagcagtttgccatgcttgctgtgacaatgcgagcgcccccgccattacttcttccatcgatacggataaaccatcaaacatcgtcgcgatcccgaatccattctgtacagcaccagttaacatgttaaactgtagcttgaacgtatgacgggtttcattccatgcctgtaacatagcatcactgatatttgtatatgcgaaaccaacagttgccggaatgcacgaaatatcagcacggcttaattcactcggtaatgccccataagtggaaggcattgcaggaggaacaggaggaatgcttgtatctgcgttggtgttaacctgcatacccgtatatttgcactggtgcgcccctgtttcatcatgcttcatataggctatacgattaccgttccaataataatcaatattggtgaatgcgccagtgtcctgattatacgcctgacgtatgcgagcatcacatacagggtttgttccggaaagatacccgccactgttttcaaccttatacatagccagttcgccagggtttttgtataggtttgattttgacagatccgcgccgtaccaatcattaccaccattgattttagttgcaccaatggatgtaatgtaagcatcgatttctgcttgagtgttgaaataataaccaatcttcggaacaaggatccctgttggctgtccggtatttggatctgttcccggtgaattgacaacaggtagatccgtgcttctatgtccgaacggttcttgagtataaagatgagtaccgattttgattatctcggtatcccactcaaccccaacagccggataattttctgtatgcccttgccagataacccgccgataatagccagcggggatctcagcatcacaaggatgctgataattttgcataattccatcaattattgattcataatccataatcatttaattaccccacttggacggtgccgccagtgatttttgttaatgcgccagaatcaataaacgtgttattcgttgctttgatattgatatctttagcaccgatatccatcgtttcttcaatctcaattttcgcattttttgcagtgaccgttgcgtcttctgttacagccacggttgcattctgtttcacatttgcggtaagattctgatcaacgttaactgttgcatctttgtttacagttagttcagcattgcctttaatcagaccaacgtactcaccttcaaccgtttgttgaacgttgccacgaacaaattcagttacgttaccatcaaccgtctgttgaacgttacccatgttgtaaatgaacgcatcaccttcaataactacctgcaagttgcctttaacgttgagtttccggccctgcatcacaatttgataatcatcccctacaattttaacaacgcgggttccatccgggcgaatttcttcgtaacttcctgctgggtgaacacggttatatcgttcatatcctggggtatcatcgaattcctggatgtgtccggatctcgattcaaaaaccatattatacgggtattcagcattatacgatgatgctggttcttcaaacatcacacgggtatcaccaggagtaaacggatcttccggactagccgccagcaatgtagcaccgttatacgcagcgtaagcagcactcagagagcgcccttccggatctggtacttgtaccccatatgattcaaggttgcccgtgaggacgattttagacacgcgagaagaacggcctggagtttgactagcccacagtgaatttcgaagaccattataagccgcttgccaatcttcatttttcatcgcttttagggtattggtgaatttagcaacaccaccgacgcccatttgaaacgacatgttttcgatcgccatttgacgaggacggttgaggttcacatacacttcacggacgttagctgttctctgaatatcagatcttactttggctaaatcttgagcaaataaggttgatacctcttctgccgtgattgtcccgtttgttacttctcgacctaccgctttactgatcgcagcgttaatttttgcagtgtcgcgagtcttttcgcggataagcaaatgcccgatcccaattgtcggatatccttcactgtctgtataccagcgtgtgcggatcccctcatcctgcttgagcatcttttcgatcgtaaatccacccgtatcagggcggttatcttctggtatctcatccagtgggcgatcgtctgggtttactgctatgcttgtgtttgaatcacgaatgatgacactcgatgatcctttacctttcaaaccacctaaagcaagggagttaacatcgttaccaacatagcgagggtattcacccataggatcgcaaaaacctttctgtgtgtctggttgttcgacatattcaccagcgacagtaccaattatcataccatcttggtgccatttgtcacgccaataaccaacaacaaaggatccgcgagtgataccagttggagagaagcccacaccagagatcgcagcgcttctaatatcctgaataggcatcatccagggtaaatcttcaacaggaacaccgattgcatcggatttttgtttttgggctgggtgttgtccaaatacacggacttgaacacggcccaacccgcgcggatcatcaacgttttcaaccaccccatcaaagaaaggggagtgtaaatttccgcctaatttcatgagttagccttttccatttctttaataaaatcattcagaaacgcctggatgtcagacggactaatgatttttattgttcgttttgcttcattctgcaacactgcatcttcataaatatctacaggagctaatacaccttgatactgtaaatacagcattggtttgtcacctttgtcataccaatgaccagggttattggggtcttcgacaaggttataatacttgttgttgttttcatctacatgatacagaacctgttcaccgccaacctcagaataacgctgtatagcgcactgatacgcggcttcctgatcggtgatccaaccatagaaaggatcataaacagagttaagcatcaacaggatccagtagtattgctggtttccatataatgattctgcaagttgttcaggtcgtagtgtacctgttatctggtaactacgggttttatattttccaatcacacgattaaaataaaatcgatagtctcggaaaatatcagttgtctgggtgcctttgtaatcaacaggcgggaagtatgaaaatagcacgataagttcccctatctaaacgttatattattctatttaggatttacgcaatggctggaagacagacgtataaagggtcgtttgtacccgaaaacatacagaagtataaaggcgatccgcgaaagattacgtataggtcatcgtgggagcgctacgttatgaagtggctggataaaaacccacacgtaaaacgttggaattctgaatgtatagtgatcccgtatttctgcaatgcagacggtaagagaagacgctattacatggatttctatgtggaaatggaaaatggtactacatatctttgggaggttaaaccccttaaagaaaccatgcccccaccgaagccagtaaacaacaacgtacacaataaaaagaaatttattgatgctctttacacctatacagttaatattgataagtggaaagccgcaaatgagctatgccgtcaaaaaggctggcagttcaaaatcgtaacagaagaatcactcaaaaaagtttttgggtggcgaggtcagtaatccctggagggaaacatgagttttatttttgagtttgagatcatcgcggaagaggataaaccaaaagcaccacccaaacgcaaattgagtgattgggttgaactggggatcaaattccgcaaggcaaaaacgaaaggtgtttctgctaaacgttttgccgattctgagggattaaactacgcaacgttcacaaagtcaatgcatcgttacaaaaaacagatcgatgatgagattgaacgacgttccgcagagacagaagcccgtaaaaaacgtaatgactaccgtaaaaaacacgggatcgagatcatcaacgatttccgtaatagtctgaaaaagatcactgttggtgtatcagcagcaaagcgacagaaagattcaacagaatggtttggtaatttcatcaaaaccagtatcaaaacacaccgtgtggcaaaaccagcaacgggtcgcctgtacacgtttgcatatgatgcaaaatataaagacaccctgccgtattgggatagatttccactgatcattttcttaggatccggaagatcgaaagcgggtaacttagtgttctatggtttgaacttgcactatgcgccacccagagcacgacaggagtttttagaagagttattgaagcgagggtacggatccactaaacgcctctctaacaagactgtactcaaaattaactggggtaacgtgaaaggtatgcgaggcgcaacagaaatgatcaaagcatatctaccatcacacctcaaatcaccattagcagagattgcccctaaagattgggcgaaagctgtttggctaccgactcagcaatttatgtccaaagggaaaccttacggcgcgaaaaaagtctggagcaaatactaatcaaaaagccccaaccgaaaggaaggggctttatttttacagggtgctaactatttctgcaagtttgccaggggtcgcaccaggtctaactttcatagcatctttcaggtttttgtcaaccatcttttctgcatctttttcgttaaacccgcgtttcaccatcacagcaataactttttcgcgaatgcctttagccgcttcattcagatcttcggattcagccagaaccagtttagaaaccatatcgcctttatattcttgggtgaattttttaccagatactaggcgaggtttgccggaagcatcaactacggtaaacactgcatattcaccgcttgctttagttttagaacgcccagtgtacagaagacgcatatcgttgcttgggagtttgtaaactttacctttcaccagagcttcatccatagggatctcgatttcgaaatcttctgctaactggttatacagatccagattttcttccgcctcttcatacagagtagcagctttgaatttttctggtttgtcgaaatccagatcatcatccggattgccactgtagaaagaaacagtacctttagcccaatcgacataagccgcttgaactttaccagtagtcatacctttcaaacgtacaatgtttttaccgaagtatgccagatcgtgagaatccggtgctaaaacttcgaaatcagaaccatgtttgaagtgaagaaaaccgattgaatgtttatcggaagttttagcgcgttgaccacgtgctacggtacgagcgagggttttaccttcggtcagaaattctttgaattttttcaagtgagtcattttgtttttcctgatttccaatatgggaacatagtaccagtatttagtgacggggtaaaggaaaagttttcagaaaaagcataaaatttattagatctaagtattgatcttcataaaaatttatgataaaataaaatattaatatattatagatcataaaatttatgaattcaagatcagatccaaaaatttttgataaattatttattaaattttacttgatcttgttagatctttttgataaaattttaattaataattattatagatcaaagattttaaaaggtcaagtaatttcttcaaatttttatattaccccgtcaggccactttgatcccgttccccgctaaatagaggaaaggagatcctatgtctacagaaatgattttaaaccaaatctcgcctacaaattttcgggttgatattcctgataacagttacatgaaaggtttgactttacaagttcaaggggttacactaccatcaatgaacctcccagcagttgatattcctgcaaatatgatggttcgaggtaaagtacctggttcggcttttgagtttgatcctttgatgatccgctttgtagtcgatgaggaaatgagatcgtatcttgggatttacatatggatgttgagcacaaacgattacaatgagtttaactctgttgcgtgggatgatcctaagcaatcattcgctgtgcatatcctggataactcccagatgaaaacgatcgccacatttagattttatggtgccttcccaacaaacttgggtgaggttgaattgggttatactaacgatagtgatgaagcggttacatgtatggcaacttttggcttccttcatatggaagttgaaattgacggaaaagtagtcacttctcaaaagagaatgagctaatgatttatgtgattagtggaaaaaagcgaactggtaaagatacggttgctaaatttattcaagagacgtacaatgatgttcagtgtgaagcactggcatttggtatcaaaagaacgctaagagtagcaatgcagcgatatggttacgataaaccatacattcgtagtctggttgaaggaaaatattctgatccggatgctattttttatgaaggcgatcgagagaaacctcttgtgatgtctaatgaagatgttctaaatattttcagaatcgggcttgaaatcctcaaagaacgcggatacaatattgtttatcatcctgatgatatccgtaacctgattatgagtaacgatactccctggagtatcagacgcttgatgcaagtgtttggaactgatatcgtatgcaagtatgataacacggtttgggttcgttacacactggaaagattcgtcaataaatatgctggtgacgaatacaatcaccttctggtaactgactgtcgtcaggaacacgaatataaatacctgaaacgtttgggtgctaagtttgtgtttattgtaaaggataccggaattgttgatgaacattctacggaaaaaggtttgacacctcaaccgggagatagtatcatcactaacgaaggtactttgaaacaactaaagagcaaagtgctcgatacttttaaattttaacaatgggtaataaaatgtctgatattcaaaaactgcaaaatgaagtactggtactgaaaggccgcgcattcgatcttaacgaagttatcgcgcaaaaagaaagtgaactgtcggttcatcgtcaacttctgtccgacctgtgttcggtactgggtattgacgcaagccagccagtaaccccagaagcagtgattggtgcggtatccgctctgatcccttccgttgaagtcgccaaagacgcggaagatgaagccgcctttggcgaagaagcgtaaaaacaaatttattacaaaggggcttcggccccttttttattggggtgttttatgaaatcatttcttgaaatcacaaaacctgttgtagatcctggtatctacatgtgtgctaaattcgatcaggcttcatgtgaggctttgaaaaatgttcaaaagacattaggcatcacaaagaatgctgtttccgccgagaagatgcatacaacgatcgtatacagccggaaaacggttgatttgttcccacaacaggacattatagaacctgctaaactggttgatgttgaaaagtgggacacaaaatacggtagcactatcgtagggatcctggaatctgaatacctgcatagccgtttcaaagattcaattgatgctggcgcaacatacgattatccggattacaagccgcatgtaacccttgcatatgattctatgctggatgatatcagcggagtgaaaaggttgttgacactgcccgtggatttgactattatctgtgaagaggctgaatcactggatctggataagtcgttaaaagatattacagaacacattgaacagcgtggcgataagtgggttgttttgaatcacgatcgcacaaaagaacttggtgaatacgattcgaaagccgccgctgaaaagcgtttgcgtcagatcgaatacttcaaaaatcagtgaggattatatgaacagaacacgtttaatgtatcttgttaacagtgtacgaaaagaagttagcgaggcgtttactagcgcgttaggtgactggtatacaatcaaggtagcggctactgctgaccacattgcagatcgctttaaagaccgttcagtatcgattaaaaaagatattgaaacttatcgcgatatcatgatgagtctagcaaatcattattcgtgttatgttctaacctacgcggtgaaggccaaaacagaagggacacaggaagttattgtttatcgtcgggtaaatggtaaaatctttgcttgtcctataactgttcaaatgttctttaacgaaggcgaagagaagccagtgatcgctatacggttgcgaacggtgatccctgagtatgtttctttagctaacagaaaaacaatccaggtcaactacgttccaccaaaaattaattttgaatacgacggttatcgtcgggttatgtcccgcctggatcgtctaatagcttctaaagattgtcctccgcaactttggatgttgaaaaactgaaaaaagcccttgcattcgtgcaggggctttgttatattggccttgtcgaaacaaaggaggctatcatgaaactttactggttaattttctcaaacgggtttgttatgaaaggaagtgttcattgcgcaaaaacttattgtgaatggaacaattgcactttcaagatcctgagtgttgcggcgtctcaacctgtaggggattactaatgactggtgatgagtgggttgataaaactttgttgttgactttggtttatattatggtaagatacttaatatagaaaaaggaggatatcatgagaaacttaatgaacatcgcagaactcatcgcatacggcagctcactctatgttttggcgcacggtgacggaaaaggttacttaattttctttggtatcggccttgctatctctttcatcaaaaaattctttaagtgagaaatatattatggctaaaccatccggcaaaaaatataacgtcattgatgtttatagaatgactttaaaagactttgaaaacatgtgtcgggcttatggtagttctaccacccttcgcgaactggcagagtctgctaaaaaagaacgtcctcatgtttgcccgaaatgcaacggaaaaggttatgaaaccattcgttataacgcatatccgtctgggttgccagattctggatgggtcgaagatatgaaagatttcaacaaagaatgtgacctgtgtaatggtcatgggcgcaccaaagataaatttgttgcaaaacctgttaaagtggaatatgtaaaatcatgaaaatcgtcgatttgattaaaatggctaatggccttgtaacaagcgatcattatgccgactattgcgaacagtacgaggtgccactgcaacgcgcgatcaatcaatccgggtatgatggtgttagcgaaattaccaccgaaaacctgaaaacattcatcgtgtttgctaacaccttctggatgtatctaccggataatcctggtattcgtcaacctgcattctttacgctttgcaccttctgtgaaacgtatttgcctgattgtgaggatttcgaagaaatctatggctaaagtagagttgatgtatcttgataaaccaactggatctgttttcccttgtgggtttgctgatagtgcggaacaaatgatgtctatcgcgttttctcccagcatgaagccgatccctggtttagatgaaaatgtaatgaatgagtgtaaccagaacggaaaagtatggtatactcgacacgaagggaatgttgtttatcactccaccctcgaaaaccttaaatctgaaataggctatacaaaatgaatattgaacatgtatttgcacaggcattagaacagaaattaaacgcagaactcgatctgtaccgttatgacatggaagaacagattcgcggtgatcacaaaaacagtctggaacatgaatccagtcgccgcgaagtgtggaaacataccttctttgaaaatctccaggctggtgtgacaaaagccagtgctcgcgctaacaacgcacttgaagcatttgataacgcttttgcgggtgaataaatggaactatcagcgggtattatctttgttaaagatggtgccgtgttgatgggccatgccactgaaacgccccattgggatattccgaaggggcatgttgaaaagggcgaaactcatattgacgcggcgatccgcgaatgcttcgaagaaacaggatttgaagtgttcgcggaggaattagttagcctgggtgttctcgattacacgaaaacaaaaaaccttgctttattcctctatgtagggcaagattacccagtagcggaagaatgctattgtgcatccactttcgttaagaacggacggactatacgtgaaatggatgatttcaaatatgtcccagtatcacagattccgtcacatgcacgtaaaacgatggggcaactattgcctaaaattttagcaagatgagaaatatatcatggaaaatcaactgactttaatcgatatctgcaaatcaattcgcgatgctgttttaaccaaagcatccgaagtcactgtttactcttcatggagttctgaattcggctatgaagaaattgtaaacttcccagaccgcctcaaaaataccaaatggttccgttatatcgatcctaatgagctttcccttgatgaactggaagaactcaatttcagtcgttgggatgaacatagcggcctacgcctgatccctttatggttgcttccatacatcgatccggaagcaaaggtcatctgcattgatggtaacgaagttctgtttaaagatgcagataatgatcatcgttttggtatgttggcctacggtgtgaaaccaaaggcataatatgaaatacgtcgattttaatactctatctgaaatgggccttgtttggcgcattaaccgcgaaatcttacaccctctggggcttgcgctttcccgtgatgtagaaacaggttcatcacctggcgcgttaatagctgatgatggtgtatggcatttcgacgaactcacaaacgaaagaaacgcagagaagttttctaaagttttggatttacatcaaagcggaaatctgttagattatctacagaagaacgcaaaataggggcttcggcccctttgaggatcatattatgaatggtaagcgggttattgtcgttggtgaatcaaagcataacgaaaaaggcgatcatctgatcattaacaacgatcggggtggatggtacggggcgacacaaataaaaagcggttacgcaacgctggttgaaaaagatgcggttagattggcaactgctaacgatcctgggtattatggtactcgcgaagagtttgaaagcgaaaaggatcaagagatcgcagaattgaaaacacaggttcataatgcgcgtgtgtatgctgcaatgtgtttcactgtagcggttatgattacgattatatactggatggtgattttataatgacagacgaaattgtaagaaaccgtattcgtgagttaaaaactttccaaagtcgcgatcatgcgatcatggttggtagttacattcattggttcaagaacaacgatctggatctgaatccgtcctatcagcggccctacgtgtggaagcagaaagagcaagatgctttcatgaagactttgattactgggtttccttgcggtatcattgcgatcgcggttgatagtgaattcaacgaatctcgatgggtagaagtcattgatggaaaacaacgcttgacaactatcatgaaattctggaacaatgaaattggaataccgatgcctaacggttcccgtttgttttggggtgaaatggaaagacatgaacaacgtgcttttgaaaacatttcattgccagcgcttggactcgatgagtgcaacataaaagatcggttgaatttctttttgaaagtgaactttgcaggggttccacaatcaccggaacatatgcaagcaattttaactatgtatgagaatgcaaaatgaattttacaacagcgccttttgaaactggtaaatggtacttcaaaaaacgtcagagtcgtatccatagctatacttgcaagaaagaccatctttactatccgcaagtaatgcaagctatgtgtgataccgaaggaaacattcactctgttattgttccttctaataattgtaaactgagtctggttcagcgcaaaattcctaaagaattctatgttctttatgaagagtttacccctactcacctggaagaatcgttatttttcaaacagggtaagcgttacaaggtttctaaccgtgggatcattgattgcctggctgaaatcgatttagggaagtatggtcataacacatcgttacgccgcttcctttcttatggtagcaaccgacaggaacagcagaacgttatctatatcaataaagttgatatgcatggtaacgcgatccacattctgggaaattcatgcaccagtgaagtacaaagttctttccggactaaaattcctggatggatgttgatgtttttggaagaagtaggtgaaaataaaccagtcgtggcaaaggatccggtcgaaacgatgatccagaatcatgaaacactggaagaaacaacccgccgtgaactcatccaggatgaagttgtggatcttccaaaggcagaaggaatattggtaagtcatgaagatttagccctgcttgatgcggttaagtttctcattgaacaaagttctgttgattatggttcccgtgctcgtattcaactgagtgcagaaggttacacgtatggtgtagattctcatgaattcctgatcaagtgggccgaaaaacgccgtagtgagttgatgaaatatagcgatgaactctttaataaaatcaatgagttgaaagcaaccatcgaaaaattaccaaaataatcaaaaagcccttgcattagtgcaggggctttgttatattacacacatcgaaacgaaacagagaaaggaaaatatcatgaacatgaataaaaaaattgccgctgtagttggttgtgaagtttctaacgcagaacgctatgataacggtttttctttctgtgttccgactgaactcgatgcgtacaaagccgcttacaaataccgcactatgcataaggtaaacgttacttacgcgcctaacatcgaaatgtggttggttcaggtttacaaagcatgaatttccatgaacgcaaggccgcacgaaccgattattacatgaggttcgtgtatggctggaaattaaggaaatgtgttgcatgtaacggttcggggcggtatgataacaaccgttcccccaaatgcagtagctgtaatgggtctggtaaagaattttataaaagtgaggtttctaatgagcgtatcaaatgaactgactaactatttcaatattcgttatacctctggtattgatgactgggctagggatgacgaaatgactattaatcatgcatgtgcagttcatatgaaacgcttgcatgagcaagggaaattgaaagaccttaacctttacggcgatattggatccggttactgctattcattcatgatcaatgataaagagcgcatgaccgttactctcactaacttagttattcatgaacctggtcatgtagttgcctgggggatccagaacgggcgatatactgaaaatcacagcatgaaattagcgctgatgaatcataagttgtttggtggctgtgttcctgatatctttactaacgcgctgctgcgtattttgaaatctatgtgaggcatatatgagtgatgaaattgtatttgatgatgcgacattaaacaagttgcataatgtcgccagcggaacctgtacagccatgcgggaaaaatgggcggctacaatcaccgatgataacaagatcggggttgttgatgaaatgggccgcgcgtttactgttacgtataattcgtcttggtctggtgctgacaacaaaacaaaatccaattgcttgatgaaattcatcgacatgatggatccacacatgatcaaaaagctggttgaagagatccgccgtcttaataaatttgaagcggaatcgaaccactggaaagcaaatcatgcttgtgaggttgaacgtgctcgcgtactcaaagagcgtcctgatatgcccttagagcgcatcaaagcatatgaccgtatggttgagttggaagaagaaaataaacgcttacgtgcgcgtatggaagttctcatgagcgcggaaatgatgcaaaataacctaaacatgattaccgctatgttgcattctatccaaaacgatactaaccaaacaaaaaaattgttgtgtgatcgcttcaacgtacaaggatattattaatgtcatggttcaaacgagagtgtaagcacgaagctactggctatcgaggtgcagatccttacatattccagaaatatagtcaggtagatgggatagggcgaattcatttacatttatacgctagatgcgacaaatgcggaaaagagttttcttacgctatgatgcacctggatcgggcgcttaccgaattgtgccagtattctacgatgcgttcggaaattcaacgggttatagataataccccaatcaaacgataatttttgcaaaaaccccttgccaatggtgaggggttttgttatattgcattcatcgaaacaaaacagaggaatcatgaaatgactattaaaacgagaagtgttgaggttcagaatttatatgcggttcgcacaatcctggctgttttgatgggagtctctaccggaaaatcttcttatattgatagtttcatattttctctatacaatccacgttctcgctgggatggtgatgttagttggactgaacatttttgcgaccagttgaacgagatcgcaaacgaaatcagaaacgggaaatactggaaaactggagtcttctttactctgattgcagcagaagatgttaagttttgggatgcgataggggttccgatgaaaacatggaaaaatatcgaactcgaagcaaaataaatgttgcattaaaatctggttgtggtatcttacatacatcgaaacgaaacagacaaaaaggaaatcatcatgaaacttgttcgcgaagcaatcaaactgggtaacgaatacaacggaaaatggtacttcatcatttatgacaacaatgcagaaaaactggaaaaagttgaagatgcattacgcgctatggaaactggtgcttctgttggtggtgaagtgatgacctgggaaaattactgcgacggttgcccttgctacgatgatggttttggtgctggtttctgggttgatattgaagatgttccggcattcaaagccgcctggaaaatcgctaagaaaatggcataattagcacgaattgctaaaactctataaccccgatctgttattgtacacacatcgaaacgaaggaggatatcatggaaattatctacaaaagccggaactacaaaaaagaagatgttgtagcagtttacatcaagtaccggaacgtgaaatgtgagtacagcgggatctggggttatgaaatcgttgtcgaagaagtcaacgccgacaacaaaaccatttgcagtttcaccactaacactgatagtcctctgttcactactgaacagcttgaaaaagcgtatgatctccggaaccaggcttttaacgcggtacgtataaaatgaacaaattcgaaccctatatgaaatggctacgtaatgttagcgcccacttagggcgcgatattaaacccagcgcactagctcgcgaactgtacgaacttgatgcggatccggaagatgttgcaaccgactacgggagattcctatgaacatgtacgaaatgcttaaatcagaaaacagcgaaacccagagcgaaaaagattacaacaaatggaaacgctctgttcaacatatgctaggttcctctgattatgacgaagatctgatgtatgctctttactcggacggttgcaccccagaagatgcagtgtgtgaatactacgcgcaaggggatgaataatgagagatcaaccgttcagcaaaaaatactatcaatgggttgaagaggttagatgtttattgaacccacttaacatttcgtacaaagatcatcatcgtactttcttcgggttgttctctgacgatatgacaccggaagaagcagttaaattctttatgaagtacaaataactcttgcgtttggttctttatagggttatattgaacccaacgaaatgtgaggaaattatatgttgacttttgagcagtacaaagaaaagcgtgatttgtaccaaaaatggattgatgagatcggcgcagagttacgagcgtatcctaaaaatgaaatgggtatgactattgaatcgatccgtatgtctccggcatacaaagaaaagaaaaatcttttcaatcgtgtattttcaaatctccgtgccttgaacggcgaatacatcaaggtgtacaaaaaagaactggctgacgaacgcaaacaacggtgggtaaaatgatggaacacgtaatcaaaacagagattgacaaacgcgtatttttggaaaagaataaaacggtaacgctgttgaactactccactgaaaattgttctagtgaattttggcgcgttaacattgatagcaaaggacaacaccaatcaataccgtttgataatgaaagtctcgctcgcgctgtcttccaatcccatgttagattttgagaattatattatgaataacgcacaaactgttctgaaagctcctaccctgttcatctatcaagatggtgatatccgttacgctcgctctaagtggtataactacaatttcaacgttaaaactggtgagtttgctcgctggggaacatcgttcgaaactgatcctacctatgccccattccccgaaattctcgatatcgagatcacaactaaatgcaatggccctgctggtaaactttgcggtttctgctacaagtctaataaccctaacggcttcaatatggatcttgatacattcaaatctatcattgataaaatgccctggttaacacaatgcgccctcggtgctgatgcacagggacaaacaaaccctgatatgtttgatatgatggcctatgcgcgttctaaaggcattgtaccaaaccttaccattgctgatgtatcaaaagacgttgcagcgcgtttagcggctgttgctggggctgttgcggtatcagtatacaaacatgctggattcgatgtagcgtttaattcagtggctaatcttgcagaagccggacaacagcaaatcaaccttcatttcatggttagctctaaaacctatgatgacgcgtttaacgtggttgatgctgtaaagaatgatccgcgcttgaaacaagttaacgcgatcgtattcctggggctgaaacaaaaaggtcgtgggaagaactgggataccgttacacgcgagcagtataaagcgctggtagattattgccttgaatccggtgtagggttcggttttgattcctgttccgctccggcctttgtagaggctatggaagggcatgaaaattttgaacaatacaaacagtacgcggaagattgcgaagcaactatgtttagctcgtacatcaatgaaaagggtgaattcttcccctgttcctttaccgaacgttgggtcgagggtggatggtcagaagggcttaacgtcctggaagccagcgactttatcaaagatatctgggaacatcctaaaactaagaaattccgtcaggaattgatcggtaacaaggatcataacggttgccgtaactgtccggcttatgctgtatgtggtaaagatatgcgcgtacacaaagcccctgaattggatgtatacgcggtggaattgaaatgataaaaatcaatccaataactgttgacattcccgtaaaaccacgtacactggaatcattgatcgagaagtatgaatattctctggctactccggcgacagcagaaatggcaatggcggaaaggcaaagcattatctatgaatgtgatgcgaagggtttccatactgatgaagatatggcgatgattgattatctatggaaagttcgcggcgcggtggtcgatttgattctttcaaaccaactgatgcaaaacgaaacgcgtcgtatacaagaccgtatacgctctcagttgtatgacatgagcacagaacagaaggaaataatgtatgcaagaaataatcgatgaacttatgtatgtgtacaaagagcgatgcaaaaatggacgcatcaccgaaccaaaggcaaaagcgattattgaaaattattgtgcaaaagtacaagcacaagacgctagttcaaaacttctgaacagtctgatgatccttaaacttttgattgcgtccggtgatgatatgccgtatgatacagatagtgcagaaggattccagaaaagctatcgttcatggggagtgatttactcccgctcgctgggttcgtatgactctgttatgtggaacctgatgcaccttgataagctgatctgggaagtgctgaaagaagagggtatatcatgacattcactcataccggaatggttgaaacgataacagcaggtaagaagcgtatacccttgatgaaatcggggaaatactggaagagtgaagaacataagtttgatcataatggtaactcatttggttcttcttatgctaaactacacctgaaaaccattaaaccaatttaaaggaactgatctcatgtttgaacaatcttttgatgaaatgaaagcctctgtttttgttggaaataccgaagctggaatggcgtttagatatgggatcgcaacaataaatccaggttacaatgaaatcacaagcaacaatgcattagaacttattcgtaaaatggatcgtttgcaagtaaacgtacctaagcgcctccataaaaagtggcaagcgttgaggggttcttttgttatggcattcgggcctgatatgctggaaagactttaaaaggaaactctatgttaactaatgaacttagtggggccattcgtaccattgaagggatccttcatgatttgcgtatgggtaacgaaatttgtgtaagcgacattgaagcaaatctggttgaatggcgcggcgctctgtatggggcaacacaaggaaaagatccgttgtttacggaatatgatatgtatacagtaaccattgacaataaaacttatcgttttcagtggcctgatgatgcatacgatcatatcaaaacattttacagtactggaggtgctctttttgctaccagtattggtgttaacgaattgccttttcatcctgatggattgagaccttccgatcatttaggatgtacaactgtgttactgggtatgtgcggtaactattctgatcccgtgtactggattgaagccagtaaaaccaacttaaaaagagtttaacatgaaatatattattgctttggtgttagtagttattgtcgttttagcacaatccggatgcaccgatgagaaagaagccgaacgtattctgactgctaacgggtttagcgatatcacgtacacaggccacgcctggttcgcatgtgatgagaaagacacctacgcaacagggttcgttgctaaaagccctacaggggtgaaaattgaaggtgctgtgtgctctgggttatttttcaaaaatagcacaattcgcttcaaataagtgttgacgtagatacggggttatgagactatagccctgtcgaaacgaaacacactttaggagagaaaaatggacatcatgaacgaaatcttagctcacatcgaagccaacaaagaagcaatgaaagctaaagaaggttgggttgttgttgacgattgcttcaatcctaatatctggactccggttttcatcgatgagaacggtaacgaagcccacgggttctatgatgctgcaatcttcgatactgccgaagaagcatgtgatttctgggcctacgttagcggtgatgctccatttacaaaatacggtgtgtgccgttgctgtgaactctaattaactagccccgaaaggggcttttttgtaggtaaaattatgattacgaaagcacaaaggatcatcaatcatttagaaacagggttcccgtaccagggagatttaacccgcgatattattgatatcctttctgaacacgacggcatgaaggccgaaatagaagaactgttacatcctgatgctaacgtgtttgcttcattgatgagcgatgtagtgaacattgacgccgatgaacttggatgcattgaaacaacaaatgatggtgataaaatcatactgaaacaggcttgtgaacggatagacaaccttcacgatcgtttgttcactctaacttttccgtcaaaaaacgataaaccttgttgacatccagaaaataaaccagtagtctgtagttacaccaattgagaggaatatattatgaaaagtgcttttgaaaaacgtgctgttaagaaagatgttaaaccaggcgcgatcatgtatgaagtattttgtgtgaatggcgaaaaggcggaaatgggtagcaaaatgattgttactggcttcccttatatgcatcgcagtattgggctgtttgctaaatgcatcaccctgtacaaagactgggaatgtcacacagaattctctcttgacgatcgtagtatgaatgggcgcaacggatataacttccatgctttcttcctgaccaaagaggatgcacaggcttacattgatgaagtcaatgaagaccgtcttcctcctgatatgaaagagcgaaaagaagaacagatgaaacgtaaacgtgaatttgaagaatgcttcggtgatctttacgattattaattatcgaacctcttaaaccataaataccctgtgtacccaaacagggtatttttacaagaggtgatttatgtttaaattcagtcaaaaaagccttaacaaccttaaaggtgttaaacctcaactggtgaaagtcgtagaacgtgctctgcaactgtctcctgttgattttggtgtacgtgaaggtctgcgtactgtagaacaacagcgcgagaacgtccgtaagggtgtatctcaaacaatgaactcaaaacacatcacgggtgatgctgtggatctgtatcctagcgtgttgcctcaaggctggcaaacaaaccctaaagtgtggttgcctgtcctgaatgctgttaaacaagcaggtgatgaactgggtgttaaactgcgttttggtatcaactggaaaaatgatccgaaccttccgatcgaaacaaaattcattgatgccccgcatgtggaattagcgtaacaaaggggctttggccccttaaaggtaaaacatgaatagtgaattttatgtaaagacaattgaagaatgtcgtaagatgcatcttatgcgagagttggaagaaccaacgcataattacggccctaacgattttatggtattcgaaaccaggctggatctgggcagagaaacgcaaaagactaaaggcgcgtttgattttatgaaacgttcccatagttcccttaacatttacgtagcgcatacgttaaatgcagcacaagacgccaaacagctaaatggtgctaccggatgtgatatattgaccagtaaaggggcaattcttaatcatttccgtggacgtcgaatagagcaccaggcaataaaccttatttttgatgagtgtgatcttacgcgcaatgaacgcatggacattgtgtataatacactcatgcattgtgtacaaaagaaacatccattagcatatattcacgtaatttcgctgggtatgtaatgaaaagtcatggctattcatcaagaaccatacatgaagagattcaagggatcgaatctcttctgaattttgtagatgttgatacatctacaggtaaagtgtattggaaagttcagcgcggccctatgtctcctggaagtgaagccggaagcaaaaacgagtattcccaaattcattttaaaggttctatgtatttgcgacaccgaatagtgttttacgttgagaatggttatcttcctcctatcgtagatcatgtatatggtgttgagaatggagatacagcaagaaatttacagaaagcgacgaaccagcaaaatgcgatgaaaaagaaatgtaactcaaacagtagtacagggttgaaaggtgtttcttatcataaagccaatgggaagtacaaagcgcagataaacatagatgaaaaaagaaaatttttggggtactataacactccagaagaagcaaaatccgtttataaccggaaagcaaaagaggttttcggtgcattttttaacgaaaccacataaggttaatgtatgtcaaaatacgtattagacaccaatgttttgattagtaacccctattcaatctattcattcactcaacctggtacagaaatcattattacctctgctactatgggtgaattagatcacctgaaaacgaaagaacgaacagcgcacgaagcacgattggcgatccggcttctgtcaaaagttattttcggtcagtcatatgatgcgattacgaaatcaggtattcctttaaacctgacaaacccagcactgtctgacactatcacccttaaagtggttgattatgtcggaaacaaaacgtttgctcttgacaagcaagacgaacgaatcattgaaacttgtatgcaacaggatgcaaccttagttactcgcgatattatgatgttgctgatcgcaatgtcccgtgggtgtaaggtagaacagtatactggcgacgatacgttaaaagatagcgatgtattgtattccggttacgtagagatccctgatttctgggataccgtggaagtgttgggatatacggataatgtagcccaaatcacttacagttcgcttcctgacgaagatttttatcctaaccagtacattacctcaaatggtgagttagtcgggcgtgtggtgactgctgatgagatttgcttgaatgtcttacctgttaagcacgaacaggctatgaaacgcaaactcatgaaagctatccagccccgtgattctctgcaagcggcttttgtcgaatccattatgagcaatgaaatcgatgttgctaccattatgggcggcgctggttctggtaaaacaatgcttgctgtttccggtgctatgcacctggttaatagtggacattacgctaacttgatgtatgtgaagtcagatagcccgttatcaagtgaaattggcttccttcctggtacattgggcgaaaaactccggccttctatcgaaccttgtattactagcctgaacattctgtttaaggataatccggaatctgaaaaatacattgaaggtttgattgaaaaaggggtggtgcaattccctagcctgtattacttccgtggtcgcagtatcggacatccggatccgggcaaaggttctgtgctgattgttgatgaatgtcaaaaccttagcaaccacgaaattaaatctatcatttctcgttgcggagagaacacacttctgatactatgcgggaacattaagcagatcgacaaccctcgaaacactgccgttaacaacgggtttgtatgggctgttgaaaagctgaaagaatacgaacactcaagccatatcattcttgatacagtgtatcgttcccgtctcgcggcgtttgtcgaagacaatttctaatgatgggggcgaaagccccctttttgtgaggtgtatatgattactgttatccatagcccaaaactgattactgtttgcagttgctgtaaaagtgggttagaatatgaactatctgatatacagcaaaagagagaatcgatttacaatggatttttctctgctgctgattatgtcgtgaaaaaatttatcacatgtcccaaatgtggtaactctgtgaaattatttttgaattgaggtttccataaatgaaactagaaaaacgttattatgtagcaaaattgagcgatcttaaagaactgacgccagaagatttgaaaacgttcaacgaaatttgcacgaaaatcgaaatcgggcgcgggattaatggtaagaaaccgtttgatgcaatcgtgatcgagaatgattggcccgaatacgataaagtgttggaaatgctgacttctcgtattgttcgcgaagaaaccgatcgcaagtttgaaaagatgctggacaacaaagaacgcctcggatactttttcgttgttgaaactcaccaggggacttttctgatcaccagtgatgcgcacagcacgaatcggctgacgaaatacagtgggtacaaataccgcgcattgttcagccctgattgtggatttgacaacagtgagatccttactactagctggagcgtctactttaaacatgccgttatggtatcgttagatgaaatcattgcactatacgatcctaacgaggctatttcaaattataacattgctgagtttatcaacgataaactacgtgacgcgaaaactatctaaaatagttgcataaatataaagtggggtgtattattgccactctttttgcaacataggtattaaaatgaagaaaattattattgctgccagcattttcttgtgctctttttctggcaacgctgcgacggatccgctaggggatttcattgcggatttgcctactcatcaattgcctttacaaaaggctactgtgaagcctccggcaaacaaaaattctccatcctacatcaaggatttggataatatcacaccgaagcagaaagaggttctggagtatgcttatcgagttggacacaactatgatttaaagactgcaaaacctgtagaaaaagataaggctaaacgtttaggttatcatttagcggctattgcctggatcgagtctcgcgcatgtgagaatgtcggtaaaggtaaaaaaggccatcacgcttatggatgctggcaagttaccgcaagtagcgccagcgcacgaatggataagtcatatcctaaacgcgtagtaatcaaaaagctcgaaactcttcaaggtggatcgaagtatgcgatctatgaactggagtactggcttgattaccacaaaggcgacttgaaaaaggcgctggcgagctataacgctggtttcaagtatacaaagaaagaagcccgtgattatgctcgtatggttaatacaaccgcgaagctgttagaagaaaaacaaatcatttgacaaaaagcccttgacttcggtctggggcttttttattatggatgcatctaattgagaggaatacattatgagcgtttcacatcaagtcattgtttcacaaaaatatgattaccctaatctgttgcgttgtgtacaaacaatccgcgatcattttagcaaacaagataacatcgttatcaaagagattactttgagtaaatctctcgattgttttaacatttattttacatatgataacgaacagcgccgcttgttcatttgtgaactcatggatatgtattatgatatggaatacaatcctattcctaaaaatgggatgtattttagtatcaatgtctggggaggatcacagaaaatcatggatcttgtgaaagaagcagtgtataatgtcattacaagttcggatactatgtatgagcgcccgaacgatgcatatgagtcacgattcactttggttaaatgaggaatacattatgagcgacctgatcctgaacgaaactaaacgcgtactgtttaaagctggttcctacatcgtagcgactccgaaaggcaatacttcccattgggcggttgctgattggatcatgtacatcgacaaaaacggggaatgggtgcaatgagaaatttagctttcgaagtgtccgtaattgatcaacggataaaagaacttcatgcgaagatagccccgttgcaagaagaaatttctaccttgatcaaggaaaaaagagacctgattgaacttatcgatcaggatatcattaacaacgtcaaggacggggaaaagatccccgtgatgttggaatatcgttcttctagtgtttcttatcacgcggcgacaaaatttttcgaatctatcggcctgggtatcgatggtatggatccggacattaaccaatactgtttgcggatcgcgatggatgaagacggttcgaacattaatcgagtgttaaccgctttagaaatggttgaaccttttgtaaggccgcaagcaaatgggcgtaagcgtttcgacctgttcgaacatactctatctgaatgggattgctactggctgacatacaatccagctaacaaacgttgggctgttgaaactggtagtgggatgagacgaaatcaggatccgacattctctgatatgtctctgaaaaaagttcttgcgtatatctgcaatgcgcattattatacccctatcgaagaggatgaataaggaatcatcatgaaaaagttagcactgcttttaactctggttgctggatttgctcacgctggtgatgctcgcctggatgagttatgcaacaatcgcgatatcaaagatgtcgcagtatgtaagcaagtgatcgcagaacagttagatgttgcttatatgtggggagaggaaaacgctcacctgtataaacgcggtaagttgctgaaacaaaaagagtttttgcagtctgaaccaatgatgaatctatgcaaacaagcgccaaataaggaacggtgtgaaaagttccgcacttatttggttgatgaattcaatgctggtatagggctttactaatggctatctggatttttattattatggcggcggttgtagttttcctggcgtacaatgctggtaaacatgagagtactgggccttgttactattgcggggatgatgactatgtttagtgctggatactttataggcgttgttatcggttttataatttttggtggtgttttatatatgtgtcatcaagaagatcgccgccgtgaacggaaagcgagaaaatgagcgtaggggttcaattcactgtattgtggatccttgtgattttgatgggccttgttgtggccctactatatcggaaaaataaaaatgatcattaaagaagtgaaaggtaatgctgtcaacatgtatctgaacggtgaaggccatttgatccacggatgcaactgttattgcaatatgggtgctggtattgctcgcgagatccgcgatcgtattcctggtgcatttcaagttgatgccaacacgttaaaaggttcccgtgataagctcggaacttgttctgtttacattggcgaaaaaggcaacattgttttcaatgcatatactcaatatgatttctggacacctgggccgcgtgtcgattatgatgcaatcggtaatgcgtttaaacaggctgtagggcttgctgacgccgttaagactggaaagcctatcatcacacctttaatcggtgctggcctcgctgggggcgactgggaactcattaagcgcattattaatgaggtgactggcgattacccgatcatcgtcgttcatttcgatccacgtaaggcgaattaatcatgatggatcctatcaaagcagggcgtgagattaagaaagcgaacaaacggatcgccgtaatcaaagggcaacgcgccgcactggttaaaacctgtaatgcattggcgcaagcgatgaaagcgaataacatcgacgttatgcaacgtaaagaaactgttaatgttctatgtatcgttgacaattgtctgagtaaggaaatggacgaactgaaaagcaaaatcaatatgtggtatcttgatattcatcaagcacaagatagcgaaatgggcggttatacacatggctaacgcaaacattatagaaaatgttcgctgtcgggattgtcatttccctttaatttgtgtaatgaacattaccaaacccccttatgatgagtgggattggtggatctactgttcaaataaaacatgcaaaaaccatgaaggggaagggaaattccaaaataccccagattttgttgagaggataaatggctaaactatattttcattatgcatcaatgaatgctggaaagagtgctcgtttactcaccgatgcatacaactaccaggaacgcggtatgcggatcctgatgtacaaaccagcaattgatacgcgagaaggtaaacagagtatctcttcgcgtattgggttggaagcaacatgcaccatgatcacgcctgatatggacttgtattatgatgttcacaacaatcatttttacagtgatagcgagaaactggtttcttgcgtgtttgtggatgaagcgcaattcctttccaggaaaaatgtcatggatctgtgtcgggtagttgacgaattagatatacccgtaatgacatatggattaagaaccgattttcagttgaacttgtttgaaggttcttatatgttgctggcgctggctgatgagatcagggagttgcggggggtttgtcattgtggaaagaaagcaactaccgttgcccgtattgatgcgaatggcaaatttgttgctaatggcgaccagattgagatcggggcagaagacaaatatgtttcactttgtcgaaaacactacttgcaactaaagaacaaccctgatacagtggaagcataaacaaaaggagatcattatgagtcgcacttaccgtaagaaatacaatcctcttcgtgaccgttcatctaacgaaaagatcgaagaagtaaaagagtattctcgttattatgctcaacatggtattgatccggatgggttacgttggtactcaaccaactggaaacacaaatcaggatgtgcatacattcgatttgataataatttgtgtcgcgacggtaacaaagctcatggcgatctgaacgcaatgctttctattgcagtaaagaaaattgattcaaaagtacgtacccgtttacgtcaggaactgaaacgtatgaaagctggtgtgatcggttgggatgaaaacgtagaaaacgtgaacaaaatacgcgctttcgaaagaagtttgtgttggtatgacattacttgattgactttacagcaaaaatattataacgaggcttcggcctcgtttttgctataaatatatacaggagtagacctatagtgggtctatgagtaaaagagtaattgttatgaacattaaacgcatatcaatggctgtgctgttcggattgttgatgatgacacccacaacacacgccgccgaccgtccggttcagaaagaatttgacgattatatcaatgcggcccttcaagtatacatcacaacgatccctcccagcgtaaatacaagcgaactattctacaactacatggaacgaaaatggcgccaaaaacaatgccgatctgaatccgaatgcgcaaagctagggattagggtcgcgtatgagtttgcaagtatccatcgttcataaagggatcatcatgcaatcatttaaacaaattacagaatctgagaactcaagcaagatagatgcctttattggcatgtgccttatgtccgttacctatatgcatagcgcacattttgcaacaggttcatactcacaacataaagcatatgagggtttttacgaagatatgcaggatttggttgataaattcaccgaaatccacataggaatcacgggaagatacaaacctgtgctaaaaaccgaaaatgtgcttgacacggtggcgtatctccgtaaaatagccaacgaagcaaacgagatctacgaatcagtagatagttctttgaagaacatcctggacgagattaagggcttgtgctatcaaacaatctacaagctgacaaaactttcttaaaaatagtttgacagcgtgaaatgtgatgatagaataactatcgaattgaacaacaacttatggaaattatgatgaacttaaacactatcgtgaacaacccgaagaaaacctctctgatcgctctgggcgtagtcgcagcactgtggttagtgcctaacatgtataccattgtgcaagacggtacggttaaaactgaaaccttcatgggtaaagtatcaccgaaacccgtactgcctggtttccacattgtaaacccgctggcgacgtttgacacgttcagcaccaaagacatcgcgatgaagttcgacaaattacaggttccgtcccaggataaatttaaatccactgtggatatgaccgtaatgctgcaattcgacggtagcaaagcaccgatcaaccgtatcaacgcgggtaatcaggatcaggcactggataagtatgtaactgaaaaactgctttccactgttcgcgaatttggtaaatccgtaccaaaagcgcaagacctgtttgatgcgaagatccaaaaccaactgcaaattgcgattcagcaggaagtagaagattatgcacggccttacggttacactgtgaaacaggtattcttgcaggatatcaccctgccggaagttatcatggaacaggtaactaacacgaagatccgcgaagaacaggttaacgctgctaaagctgaactgcaaaaagtagaacagacttcattacaagcagtaaaacaagcggaagccgatcgccaggcgcgtgaaaacgctgcaatcgctaacgaacgtgatgctgatgcccgtctgtatgcagcgaagaaagaagcagaagccaacgccgccctgcaacgcaccattacaccggaaatgatccgctggaaagaactggatgtacagatgaactactctacccgctataaaggtggcgtacctcaaactgtaatgggttcggattatgcgggtaaagtgattttcgattctcgtaaataatgttttaaagccccctctttgggggcttgacatctaaaacgagaatactataatgaacataaaacagatcgtactgacaatactcatttcactattctttggtttcattggtggattgtttggtgttttaataattgcgtctgttttatgattaacctttaaacgtggagcacgttatgaaacacaaatatgataaagctgtagtaattggacgttttcaaccttttcactatggtcatgagaaaatggtaagggaagcccttgctgttgctgatacggtttacattctgatcggttctgcttatgcatatccgaacacattaaacccattgaccgctaaacagcgtcaagcaatgatcactcgctggtctatctgcaaacttgatgttgaagatgcagccagaataaaattcgctcacattccggattatctctataacgaggaaaaatggaaatcccgtgttcgtatggcaatcgatgaaactcgaaatgaccgaattgcgatcgtcgggtacgaaaaagacaaagattcttactggcttaaagcattcggatggaatcatattccggttgaatctgtgaaggttggagaccaggatctgtcctcgaccaatttacgcaaaattatctgggaacaccatgaaggctgggacgaagatttgttaaaatatgcgcctagcactacggtttcctttatcgatgaatggacacaaacaaaagaattccagcgtttgtcccatgaagatgcacactggcaacgagagattgacaagttcaaaaaatatccgtatccggattctctgaactgttgcacggctgattcagtggtcgtatgtaataaccacgtgttagtaatccgtcgtaagtttgcgcctggtaaagatgcgttagcgcttccgggtggacacaaaaacggtaacgaaacgttccttgattgtgcgatccgtgaattactggaagaagtacgaattaaagtacctgaaaaggttattcgtggttctatccgtaattcgatgctgttcgatcatccgaaacgttcggtgtacttctcaaaaccgactgtagcacagtatatcaagctagaacctaataacgatggttcattgcctcgtatcatgggcggtgctgatgatgcagcagacgcgttctggctacctatgcatgaggtcgtacaacgacaaggggaattcttcgatgatcatttccagatagtaaacgcctttacgggggttgcttgaaagcacattcatctaagcaaaccttagaacaagaagccgcacatatagatgatcttttatgtgcggttattgtgaatccagatttatacgaaatttaataaaaaagcccttgcgttctcgtgagggcttttgtattatacacacataccaagtgattaatgaaaaggaagaaaaatgaatacaatcaacgtttctaaagctgatgttatgaaagcaacgattattgctaccgaagccctttcattcatggctaagaaagcaggagttgatagtgctgttatcctgatggagattacaaacaacccagaaggcaacaccgcaaggtatttcaaagatcttacttcctatgcaatggaagaatttaaatgattaaacatccctattgtcttgttacccgcccggttagtccgggtggtttgcctgttacctgttggcagttgattgaaaagggtgatgcgtttttaaacaaacgtggtgagaatgttttcgtttacggtgttaactcgatcgagaatgaaactatggttatcactgacgaaaaaacaaatgaaaaatacacgttgacatccgaacacgattgtcgtaattttaacgtatattggaaatctgatgaagaatttgaaactgtgaggaaatgattatgatccctgttattagtgctcgtgaacaagtagcaaaaccccgtgctgttaaagttggtgattttctggacgtgagttttacctgtggagaaactcagaagcaacacaaagaatctttcagcgtgatccttgtatctaaagattctgatggttcaatggtttacattctgcataaagtaggaaccgcccgtgttcagggtcatgtaatgattatctcagtatatcctggcggagataaagtatcttctcagtgtttagataaagtgactgctcgatatctgagagatagtgttttcatggcggagattagcaaaatttatgttaattctcgttctgctgttgatggtattgttacccatgtaggcgatgaattaatgtttaccgaaaaatctcatgaatcggttagacgtgctgttaaagttggtgataaactcggaagccctcgccgtgattatgtggttgaatacattacctcttctggtgatatcatcgtgaaggcagaaaaaggttctaccgttgttatttcccgacgcgataaaaaactgattgaatcactcaatcagaatctggaatggattgatgaatcagaggtgtatgcagcatgaaacctcgcttgattatgtcggatatagtgattgtcaacaacgaagaatactatgttgcagacatgaacacgaagggaacccgcgagattttggatctggagtgtgttaagggtggcgaaaatcgattcattgtgataacatacaacagaagcagtaaagaaacattgggagtgtctgttcccgttcattactgcgaaaaaactaattgctggagacgtaaatgattgatttaagtgatgtgaaagttggcgatacgttgtatgatgctgggatccgtagtgatcatcgacaaaatcgcaaccccaaaaccctttatgtacaaaaagttgcgcgtcagtacctgtatgcatcttttcgaccggaagatgggcctgattgctgttccaatattaaaatcaagcgcaataacgggtgggctgatggttggatgggttatcaactatatcgcagcgaagaagaatataaagaaatggtgtaccgccgcgatttgtgtgataagattaaaaaagtatttgggaacagctacggaacaaacatccctgatattactaccgctgaattgcgcgggatcgcaaaaacattaaaggttgaattctgatgaaaatgattatggaaaccgtatttggttctcacctgtacggactggaaacaccaacaagcgataaagactacaaagggatttatctccctcatcctcgcgaaatcctgttaggtactgcgaagaagtctattgatacatcaactggcgataaaaactcaaagaacggtgttaatgacgtagaccgtcagatttacagtctgcaaaagtttatcagcctcgcatgtgatggtgacaccgtggcgattgatatgcttcatgcagatgatagcaaactgatcgctaactctgatatctggcaatatctccgcgctaaccgttcacgcttctacactacggaactaactggcctgtttggttatgttcgtaagcaagcggcgaagtatggcgttaaaggttctcgcctggctgcattacgtgaagttgtcgatgtgttgcagatgattcctgattactggtatggcacatcattgctgggtaacgtagatgaatctaactacggcaagcgcatcaaagttggtgaggtttctaaccgattcccgaccaacgagttttgtcgattcgttacagacaaaacactgaaatcaggttgtcaggaattttatgaagttctggggcgtaaattccagtctacaatcaccgtagcggaaatgaagaaatccgtgtataaactctgggatgaatacggggaacgcgcacggcaagcagaagccaacaacgggatcgactggaaagctctttctcatgcattgcgcggtggtatgcaattgatccagattttcaaagaaggtgatattgtgtatcctcttccggatagcgcatttttgaaaatggttaaagctggcggtgttcctttcgcaaccgtacaagaggcgctagaatcaacgatgtgtgaagttgaaaagctggcggctgtatctggttatccgaaagaagttgatcgcgatttctggaatgatttcattgaacgtgtgtattctgaacatgttgtgaggtactacaaatgacatacccgaaattatccggcgctgaaattgatgttctgtgtaaactttacagatactcgtcaaaaatgttggatttagatttcaacgatgttcccagtaaatcggggcgtgatgccctgattcaaaaaggttatgcatctatggcgtttagttcaccaacgaaaaatactgatatgtgtttagtgatcacccctctgggcgttgacgcatacaaacacggaattgaaacggagtggcgataatgagtgatgttattttgaacgttaaagatgtagtattgggtgatactaaaaccctagattcggcaatggaaaaggctgttgttaaaattatgcgcaatagcctccgcctggaagttaacgagattacagaaacttgttatacaggtgggctttgtggtcaatctctttatcgtgatgcaaaaagtgtgaatattcagctatgggctgatattggcgaagaatcatacaaaatcgatgaggttgatttcgacgtatgaaaataattgacctttgcgctggtgttggtggcgtgaggctcggtttcgataaggcattcggcggggtcgaatgccttttaacgtctgaaatcgataaacatgcacaacaaacatatgctgataactggggtgatgaaaatattcagggtgatatattcaccattgatgaaaacgatgtacccgatcacgatatcctgttggcggggtttccttgtcaggcgttcagtaaagcagggttaaaacagggcatgttagatcctcgcggtactatcatctttgaaatactccgcattatacgggctaaaaagccctctgtgctgttctttgagaatgttccccagctattaacccatgacaagggcaacacgtttaaaaccatctacaggctgttacaggacgaaggatacgatatccattatcaggtaatgaatacaaaagattttggattgcctcaacgaagagagcgtgtgtttattgtctgctttcgcgatccggtgttctttagctttcctgttcctccacgtaccccaacaagggtcggtgacattctcgaaccggataatgatcaatacaccatatcagatcgtgcctggaagggctttagagagcgtaaagaacgaaacaaggcaaacggcaaggggtttggctatcaggccgttacagttgattctgtgtgtactgggacgataacagcccaatactataaggatggtgttcaatgtctggtattacaggaaggtaagaaccctcgaatgttatcacctcgcgagtgtttccggttgcaaggatttccggattcattcaagatgcataagagcaaaacacaggcgtacaaacaagcgggtaactctgtatctgttccggtgatcgaagcaatcgcaaaacaaatcaaaaaagcgcttgcacaggctaaagaataatagtatagtgtccttgttgaaacgaaactgacaaaaggaacataccatgacttttaatgacctgtttaacggatgtactggtgctggcgcgaaattcaatcttctgaaagattatccgctgggttctaatcctggttatgtgatggttgaagttcgcaacggtgaatactataacgtgttcatgtgggatcgttctttctcttactgctggttcggtgcgaaatataaaccagattatattctggagcaaatcgaaacagtgaaagttaaaaaccctgaactgtatgcattcgcagagtctattcgtggtgtgttcggacattgattaataaagccccgaaaggggctttttcgtgaggtttatatgattaccgaagttattgaaatggttttatacgcgttaacgtttgttctcttgttccttagtgcggagtggactagtcgcggaaatgtagtaatggcccgtatttgtgcggttgctgtgttctggatcctgggtttactgctggttagcatcgttagggggtggtgatgatttacgtagcttcttatagtgctgattatgaattcactgaaattgcccatgtttctgaatcattgcaaaactgcgttgatgcgctgaacaaagttcctaatttcccttatcttggtgatcatgttactattgatgtatgggaaaatgaaaaaatcattgcaaaaagttcaacattcgggcatcgcgatgtatgggatgatgaatcactacagtacaacgaaatccccgtaacttttgaagaggttatgaaaaacatgaaggaagtgaaagatgaacatctatagcattgagttgatttttgatgaccgttttgagcaaacgtctgattgtgtatgttctactgttgacctgaacgtcgcgatcaaatacattaaacatacaccgcttccgtcgttgcattactattgtgtaactgtgtttgacgggtttaccggaaagcaaacgcatcgttgtactgttgggtatgacgaaagaaaacatttcaccgcttttgaatttgaggaaatcaaatgaaaatccgttctggttttgtgagcaatagttcatcaagtagctttattgtacggttcccgaaggatccgactgatatcaacaatctccgcgaaatgatgggtgattgtgttcctaactgtggttatagctggatgacttgcccgacagcggaagaagttgtacagcaagtacaccgcgacctgggtggtcatatgggtgatggtttcgaatcatactatgatgataagcgttatgaatgggaaaccgaagatagcgcagaaactcgatatcggtctaatcctcaaattgcgcttgcttatgatgggcgtgactggtatgatctggaaacagaagagaaagacgctctgatcaagatgtggttgtatgaagagtacaacgctaaatttggcaatcagaacggtgtattcatttatgaatttacttactctgatgaatgcggagaattccaatcacagcttgaacacgggcaaattttccgtaatctggaacacactatgaagagtcatcactgatggaatacgaaatctgtgtaaaaatgcccccctatcaactgggggaagaaataacgtttagtcaaactctaccagtaccgattgatttattttctttgcgaaaatatcttgaacggttcgatctgaatgagtatactattcaaatcgtaaggattaaaaatcctgttgcctacgctctgtcttttgacgttggcgagtctcaaacaacaacgatggatgattttgtttcattgttgagtagtaagtttggatgcgatgatgcattagatactattagcaaaaaagtaaacgaaattttaataaaatttacctataaatgagaaaattatgatcactaacattgaattcaaaaacgccgtagccaaaccaaccccgactaaccacgtttttgtttgtgacgtatccggatcgatgtataacgaactcccgcgcattcgtcagcacctgaaaaacaacctggcaacgctggttaagcaggatgataccgtatctattctgtatttctccagccgtggtcagttcggttctgtattcgtgggcgaaaaggttagctctgtatccgacctgagcaaaatcaatgatgctatcgatcgttatctgcgtccgaccggatgtactggcttcgttgaacctctgcaactggcggttgaagtcgctaccgatctgcaagcggataatggcaatctgaacagtctgatcttcctgactgatggttatgataactgctggcgtactgatgacatcctgaaagcgtgttctactctgccgttgacgtttaacaacattgctttcctggaatatggttattatgtaaaccgtcctctgctggaaaaaatggcggaagcaaccaacgcattacacaaattcgttgaagggtttgatgcgtatgtacctgcatttgatgaaatcattaccgcgcaaacctccgcacgtgttgaagtcaaagttggcgatgcaactcatgcgatctacctggatgaaggccgtgtgtatgtcctgaatgctgcaaatggtgttgttctggttccggaacatatcaaaaacatttgggcgctgggtgaaaacgcgatcaatgacgttgacggcttcgatccggcaacagcagaaggtgaacaggttctgtatgtggttctgtatcatgcgcttcataccatgaatccagatctggcatggaaagttctgaaaaagctgggtgatgtgcgtctgattaaagcatacgataactgctttaccaaacaggattattccaacgctaaagatatgatctccgaagcggttgttgatccggctaaacgtctgatggatggtgttgattacaacatggttcctgatgaaaacgcgtttactctggttgatgctctcgaactgctggcagaaaccgacacagtgatcgacctgtcttctgaacactgggcgtacaatcgtacaggccgtcagactgtccagaaagatgatgatacactggataaactgtcagaacagattgcaaacgcttctactccggaagaacgtaaagcactggcggcgcaactggtagcgcatgaagtatggaaaccggaatttactcaaaccacaacgaaagttgcagtgaaacacctggtgggtaacagttcccgtccgaacatttccatcaatacggatctgcaaggttacgtaaccattccggaaagcaaacaaaaagagtttggattgccggaaaaagtagaaaccaaacaagtacgtaactttaccattgttaaagatggtatcgtgaacgttaaggtacttccgctggaaactgatattccgactctgaaaaacttacgtgcttctggtctgactatcaagccgctggctaaaattggtgaagaccgtatgtctgtactggttgactttacctctctgcctctggttaaccgttcgatgactcgcggtatttctggtaaggaatttgttgctgataacgtccgtctggaaatcctgaaaggccgtcagaaggtaatgaagttcttccgtgataacgcgattggtttacgcaacgcagaagggcttaaacagcgctttggtgaggcggctggtgaatggttgtctgagcaagggatccgtgattacggcttctctccgaaggttgagcgcacagaatcgactgatgtttacatgtcgaaagaactgaacgtgaaaatcaaaggcgtttcatcacttccggctgttgctgctaccgttgcaaaacgcgccgaaggtaagaagaaacttaacaatggtgacctgatcattctgtgggcttacgataccgtatctaaagagatcgaagcgcttgacaagaatgacctgatcgagtatcttgataagcagacaaaggaaactattaaagaggttcgtgcccttaataatcgcctgagtcgtgtaatgtacggtattgtcgtcggacacgcatggtttgcggatctggattttgaagaaaccagcgtaagcgttaccgcaacagatatcgttgcagcggaattctggaaagatgtgaaatttgattgcacaatcgttctggaagaaaaagaagttaaactctaatgagatctcgcccccgaaagggggctttgaggtgacttgtggaattacttgaattggactttaaaaatcttatgaatatatgcgaactgaatcaaggtgacatcctttatttctccaatcgtgatgggtttcgtaattcccgtcctgaaaacatcggctttcattcacagctacctgatttcatcgtcgttgatgatgtccggttaacagataacggctggcaggttgatgtagtcggattcaaaaataacaacggtgctatcgtatggcgtcctggttctattgatgaatcggtgtattttaacaacattcgtgtaaacatcgatgaaatcggaaccgatttgagcgaagtgcgggaatctccgtatgtgttcagcaactggtttaaagttggtggcgcgtatcgttctgataacacaaccgttgtgtatgttgatagtttgatgtctggtatggttaacttcaacccgtcattacctggcaacaacggcacgatgatggacattttcagagattataatcgttctggaacaatgttaccttctgaaaaagcatatgttatcaatcgttgtttgaaagggctgtaccaggatatgcttacctataacgaaggtaacgtaaaagatgcgcttcacgatctgaataagatcctgaaagaagtttctatgagaatggatacccgcaaatgatttctttattcgcgttcgtttcagttgttgtattgattttcgctggaggtgttatctatcatgggtgtgaccgtcgtgaagataaggtcattctatggggtatcgtctttgcgctaatccctctattcatgattggtaatatggtgatgcgatgaaaattcgttctgggtttgtgagcaatagctcaagcagtagctttattatcgggatcggacttgttcgccctggtaaagaaaaggaagttgctgatatctacggtgagaataatattgagtcattaatagatatgatcaccgatgatactcgttcgaagtggggtattcctcaagtcgatagcaacggtacgatctcactggaagcgttcggttcccatagcgttgagatttcgtatatctgggataagttgaaagaactggggatggacgatatcaaaattgttcacttcaatgaacgcggcgatgaaccagaatatgatgatgaatgcggaagatacaattatagctggtatgaagacgccgacgcgttcgggcctgaactcgaaagaaagtataatttattacgtgataaccgcgaactgttcattgaaggcgatgtgaattgtggcggggattacgacggttaaccactggggtaatgcatgataacgatagtatactgggaagaagtcgaaagcgaaatgatcgatggggaactggcggaggttgacggggaatccgaaatgcttactgctactgaaacaatcgaaaacgctttcgatcgaatcaaagcgcatcaaaaagaaatggaaggtcgtgatattcagtacatgatgagtttctgggtcggaggcgaggcgttatgtcatgccgtaattgcggaaagcacctcagttgatacatgtcgtgaaaagatcgaacagtacgtgaaatctttcttgcattgatgaaaaagcccttgacttcggtcggggctttttgctatattggttctatcgaaaacaatgaggaatacattatgaaatatctactacttgcacttagtcttatgaccacaaccgcaattgcttcggaacctccaaccgattaccaatcatttaaagcgttatcaaaagaagaacaatgtacgtatcttccatcataccaaacgatgtatgattggattacgttatcttctgattacgatcaggtaaagtcaaaaatcgttagtgactacttgtataacatatcgaaaggttgtattcttaaacttcaactgcaagtggatacgatgaaacttgaaaaaatggaaagaggacaataggatgaactgcgtatatatcatcattgaaaaatttacttctcctgctggtaacgttgaacaaacaacagtctgtgctgctctgaatgaagaagaagcaaagcataaagtaaaatatctcaatgaaaatgcaattattcctttcggtttcaaaggttatactgtaaaatacgaatatactgcgatttctcttgaaactagcccttcatggctacttgatatgaaatgaggttaaaatgaatccttatacaaaatgcggggtcatgtccctgttattaaaagaagttgtgcggttctatagccctattggtaaagtgtggtgtgtatctatcgggggtagacaaatcggatggatccgccgtggagatacaatcaaaggctggcaccaatacactgcaatttctattatgggctgtgaatatggtgagtttgataacttcatgcaagcattgtcactgttcatagataacgctattcacgagatcagttcacagggttccaaagttacaaagtacatggatactctttatgtgaacgtggaaaccgatcgatattgcatcatcaaagaagcactatacgatgataatgatgaggtgtattattacatcgtatccgatcaaaaccagatgcaaagttatatctccccgtttgaattgcgatatcaaacactaatgggattcattgaattctaaaagaaagccccaaccgaaaggaaggggctttttgttatgatgcggaaagctgtagtttgatttgctctacgtcatccgggtcatcaatgatgctgtaatagatggttactgttactgagttatcatcatactgtggaataacttcaacagaaagattatatactctaggctcatatgtccggatcgcagatacgatagaagttctgattgattccgctgtcagagggttcatgttctcaaacagcatatcactaatagcgcaaccaaagttactatcaaacggacgtgtacctttgatcgtggttacgataccaatcaaactatttctcactgctgcggccccttttgaggccgctacgtcattattccaatctcgttgcatgttaggttctatatcgctatatagcaacctcagatttacacccatttagaccacctttaaaaattgttgtaagcctctcagagagactatatggctatgtccacacgaacaccttaccggaatgtttgcgaccactgctggcttatccagggcggtagaaatcgatttatatgttgcatagtcgattgcatccaacaccatttctttatctttgtcgctgcaatcactccacatgatctgttcgccgtctatcattacgtaatcgataagatcggggatctcttcatcaccagtcttacgagggtgaacagataacgcgatcccgtcattgccgtatagtttatcgtcgaaatcttcaaccattatttgattgcgtttaagctggaattcaattctttcctgacattcttcacagttgatgaacagttgacgggtatcaatatttttactttccagaagtgccagaatgaaaagatattctctttgatacaggtaaacatcccctttgataaaatctgcgtcgggggtaaactctgtatgtgtcagaggacgataatcaacattatatttctcaacgtgtttatattcatgctttctcatttaacagcaccttgttttttcaagtcttctgcaagcaatgcagtataaatttgcctttccattgggctactattcatgataggttccaggttcaggccatttttatttagcagatagttggttttcacaaattcatccagatccccgcgactaaacaggatcttgaacagggttaacataccactaaatgatttaccgcgcatagacacatcaaccgatttcgttagcatagtaactattttttcgacatcatcaagttcgactatatcaagaatattctctttcgtttcttcggttagtgatgtccattcatagcgctgttcgttgtatattacataactgatacattcaagaaacaactcttcgcttgtattgcgtgtacgggggaagttaaaccctaatgtgatttcatcattcagcttgtattcgttttccagttgaatatcattaatcaccatgaaggcttcggagtggcccccgcctttaccgcctatcacaaccttgataacgtttttaccgaacgaaccacaatacacccggctgaaaatatattcctgttctgttttggaatacccagggtaaagcagatccaacacttcatccagtatttcctgttgctctttaaggggccgaccttccatatcaatacgggtcagcattagtttaaactggtctttaactgtaaacatagggaatcgtttgatccctgatggtaatgttactcgaataatatcaaacataagatcctcaaaaggggccgtagcccctttattgtcctgtaattgcggtacgtgctgcaatggctaaaccttcctctacggattgtttgaacccttcccagccttctttatcagcctcaacaacccatgatgttttataggcaaaatcaacagtaaatgtccagatttcgttgttgttctcatagctcaattcactgttactgattttgacgggcaagcacttctgaaatacgtatgttgtatgcggtgaaccatcacgatcgtgtaagttaacctgaatagtacttgtcacttcatcaatgaaggcgtattgtcctgttacatcatcgcgaatagcggaaatccattcgttaaagattttcaggttacgggcttctgaatcggtgcggaacgtcaatgacaattccccattctcagggcgagtgaatctgatttgaggtacgccaccattataaacgtattcgtacccaatggatttaccagggaggttaactcccataatgcttaaacccatattatacatcatttcatcacggaattcagatagcagttgtccatacatgctatcaccaaacagggaagtaatcaaacgggggctaattgccccgatgattttgctaaatcctgttttgttcagcgacataatcgccttatcgacggtgtaactaaacaatttactcacaccgccagtgatagcattaatgaattcgttcgggttgtttgcgttgatagaactaatagatccatcaatcaaagtatctcgaatactaccgatcgtgttgtcaaggatacgtgatgcagggctggttgcaaatacaacgctaaacaggttgctacgctgaaaatcgcgattagccatacctgataaaaattcatctacgttgtaaaacatcatatctccttagtaatttgtatcaaaaatagaatcctgacgcatatcgatcagttccataaattgaatttcgacctcaagtgagatcggggtatttggtgattctcttaatgtatttacaatattatcaatagaacgaccaaagcgaacactggtaatacctgctggcccaaaggttgaatgaggtaaacgcaaggaatccccagactggaaatcacgaataaaccagacaggaggcgatttaataacctctacgtttgaaatgaaatcaaccacgtcattacccagactattatcaaaatctgacgctgttactgggttactggaagggctaattgcgttagcggttttagcacccagaacaccgtaatactgtttaaccaatgcagcaacctctttagcagtaccgccagaagttgtgccatatcccagaacagtaaacagatagtagattttaatcagttccagcaaatcattacggctttcaatcacgaatgtattgtaatacatctttgttcgcttgtcagaaccctggaaagcggctttagtaccaacatcaagggcttctcttcggtctgccataataccgcctgaaacggattctacagcgccccataccatgtttgaaacaacacggctcaaccctttggttaagaaactatcgtttgcatcttgatagcggtggctgtttacttcgttatcgttcaggcttcgcggtagcaggatctggcaaacaggttccatagtaccaatagaactattcaacacttgtttgtacttaacattacccgtcgcagatgatagtatttgttttgggttctgtgctgcctgacgtaatgaacgatagttgtctttactaccaacaccattaaaatcatatgcagtgaacagaaggccgttattatacagactcgaagcattataagcgttatcgatacctgctgcacgttgggccggaaattcggcggtaacgatagtttgctttaatactgattctgtgattgcggcacccccagaggggataccgcgatttttaatatttttgagagtgtttatactgtcatcaataatagaaaacttcattatatgttccttatgccagcgctacgagcggtttatgctctgtgcgttgtactgaatgagttacgttgttgttaacagttttgttgttaacctgaatgttgcttgctttatcagcatccggtttatttgctgctaacggtggctgtgcgtcgatcggggcgctggattctgtacgggctgcaatcttgttttgcaattgctcgataaggtcagagattctatccttctgtacatcgtccagattgccttcattacgacgtttttcaagctgatccaacagttcatcgttaatgtatttgatatcggctgcatccagattttcagagttagcatagttggttgctttacccaacagatcatcaccttttttctcggatccttctggcggttgtttgccttccttacgcgcttgtttcaggcgatccgcttcgatttgtgcctgacgaacacgctctctgttgcgtttgttttcctcatcggctaacttctgtgcttcttctgcactgccttcaatcaatttcacctgactttttaattcgtcggtgtgttttttcatagtatccagacgttctttgtcagcatcgacaatcttctgatttctttcctgataatcagtaggagctactttgtagatcgaaccgttagggatctggctaggagtaatcgtcaacgcctgacgtgctgcaatggctttatcttctttttccaatgcttcctgttgttctgccagttcttgtttcttaatcatgataatatcgtctttggtcaactcaagaccaaatttctgtttatcacgtaaagcggtgatctgcattccacgtccggcattggtaatgctgtctatgccagttgattcacccaatgattgaataagacgaccgataccctcagtgattgccgtttgtacagtttgtcccaacaacttcataggctcaacgaacaagtcacgaagtgattcgcctaagttgttcatattgaagttgttcaaaccttcttcgatctttgttacgatagcctttacgttacccagatatgtaccaaatagtttttttgaggattccccttctttcaggatatcttcgaaccatttgcgtattgtgacgcgcaacacatcgaatgtaaagattaacgaaccaataaggagcgtccatttagcaaactttgccattgcttccagagagtaaccaatgaaacggctaaggatctgcgatgtaaaccctttaatagaaaccaggcttttagcaatgctatccagagttttgcttcttttgtcttcatcatcaatgatgcgttttttcttagtgtctacatacggatcaggttcttccactggttcaggaagcggcttatgcttatcagtattttcatataaatcaacaagtttgttaatagcatgaaaaatagattcggtgttttcttccagcttaccgaactgaccattttggttaacgtttactgtattgtcaacagtttttgagttatcatcggttaaggatataggacggatcgggccaacgaaatcaggtagttgttcggctaatgattcctttttatcctcttcgtattgttctttgaaccccgcgaatttgtcacggaatttttcttcgaacgatttcaacccctctttgatatcaagagtattgattgcactttcaagggtgttatcgttgatttcctttaggtcacgggcgctttcagcatcaagggaggctgttactttggtgaccgctggttgtttgttgttgtttctgttcagaaactttttcttttgttcttcgttgaaataagagttagccattatcattcaccaatgatgttaagccctttgatggttttcccctcatgaataatgtatacttcctggaggacaccacgcgatacctgatcatattcgaatcggtacaggcaattaattaattcgtctcgtttatcctcagttaattctactggcttaccgtcaacatatgcctctttgatgaggaacggaaggtgagcatttaacaggctgggtttgtcaaagactaaccgcacattgtcaaacgtaaaatcatagcaaggttcggagattttgaggtcatcaagatttagcccaatttctttaagcgtattggcataatcagcgttattgtgtgcatacatatggatcaacacaaattcaatttccgctgctgtcagttcacgcggtttgatgtcatcaatgatgaatcgcatgatcgcaactgggtcatctttcagagtcttaatctttacaaaatgacgatacgacatcttagggatctcaatggctgttccatccggaagatgaacggttttaacgttagtcttcttgatttcaagccgtgtagtcataaatttatcaagagttttatttttcattattgcctcaaattgaacctgggtcattatttactatttagtaaataggatatattaggagggatttttatggctgaaaaaatcgtcaatcgagtcacatcgattaaattatatacatcatacgaaaaatacattgataacgcatatactgaattgctacccgctcttgtctcgtttagtgaaaagacgatgattaacggctcatcggaaacgctgatgcagatatacgacgcacagttaatctatcagcaacttatccagccgatcatacaggtatctttccagtataacggtacacaggaacaacattattacggattgctttactctaacgtagatactgacgataaaaaccgctctgtgctgcgtatgaacctctctccgctgcataaaacgttcagacgtaagtttgcccgttcatttagtaacaacgccgtacagacgattacagagtgtatgacggcactgtatagcaaaatgaaactacttacccccgaagttgacggcggtaacatacgtatccctcctggatgtctaaatggtacatatcaggatatattcgattatatcagggacaacgggcaaagtgtagtttcttctgatttctgttatctgtgggaagatggttccggtattttccttaaaagttcaactgacattctggcccagacaccgatcccagcatacaaatttaacgttgataacgtgtttgttggcgatactgtcatattcacagaagcccagtacattacccataaggataacacaacgctgtttaaagacgccagtttctttagtctgtcattgactgataaaaagatgtacggtgatatactggctgatacagacacagagaatacatggatcttcacaaaccgtaatgcaatctatgataccaactttcagaacccagattcagaaggtaaacctttccaggcgtctaaaatgcaattgttatccagctatgaacgccggatccgattcgatataaagcagggtcgtttagatgttaaggtaggggcaatcattgaggtatttggggaagagtatgcaggaaaatatctgatcgttgaatgtgttcgagacgtatcaaaagatttccacctgcaaacacttgaatgtatacaggtgggggaacctaccagctccgctactacgaacacaactagcagtacttaatcctcaaacaatccgaggtggagatcgaaaacattgttattgacctttttacgggcctttatgatgttttcgtaatgttcgcgtggcaactcaaccaaaaaacactgtctgtcttctggagcattctcaacttgtgcttccagaagcggatagttcttaggatcatcataatcaatgttgttatcgagatccagaataacacaacgccaaatttccggctctgttgatgttttaacagtttgaaccaatgacgcgtttttcaatcccaaacgatgcgaaagaatttcatgggcgaattctgggtcatcataacggatctcttcaccattccaacgaataaggcgaacggttgcactcaatttaaatttgctcatatttcattttccttgtcatcaattcacgtaattttttagttggcgctggaggggttttaatgatttcctggatctgatcccatgtttcgggggatacttgttccttttccatcacaactatatttggattatcgcagcatttaccaacaagaacagaacgcccacaattaaggcaaatcgtatcagggcattttccaagtttatcagggtcgatagattcaaggaatcttcttgctaccgataaccgctctttaacttcttcttcgctaacttccatttgtaattttccgctattcataataatacccttatgcgatttcgtaacacttcatgacttcttcgaataccaacggcatttccagatcccatgaatcagcaactgggtcatatgttgcttgatctacaagggaaaccggaattgcagaaacccaaccagaaccaccctgaacatcaacgcgcttgaccgtcatcaacgataaattgttatagaattcttcactgaatttttcgccaccgttaccaagactctctaacatttcacggttaacgagtttgatgtttttaccttccaaatctttgttgatatcgatgaagttcatgtgatgttccttttgtctgtttcgtttcgatgaacacactataccaaacaagaacaagatagttttagcaaaaagtgctattaatggagaatttcagcagtcatcacgatccacatagaaagaggaaacccgtgaatgaatacccacaacccaaaatcatcacgtttattgtaaatcaaagcagttatgaatatcgaagccgcccaaagagcagtaaacagaagataatcactgagtgtgatcatttcttcacctcaaacaaaataccgtcttttgttgccagatcgatttcggtttccaacactgccgcaagtgtccactcatcggaaccaggtaagcgcctttccacttgtccgttatccagcttccgccactgtgcgccattaacgcgagattcataagaaacgttaactttcataatcagcccatccatttacggtatttgattgattggttcattgcagagataatgccagattcttgcatgttagaagcgcaatagacttcggcaacctggatttcgcggtcatagaggtaaacactaccacgaaaagttttcaagtgagcgaatccgcaatctttaaccaggttaaggaattctgctttcttcatcatgtgagccattttgtttatctccgtgtttcgtttcaatgaacacactatacaaaaaagccccctgcattgcaagaggcttctttaacaaaaagtgctattaaacggcttctgttttcacttctaaaccaagtttagcaagcgcttcaactgccatgaaatgattttcaaacggaacttcaacagaaattcgaattgttggcggtgttggatcagtcagatattttgtcatttgacgatctttctggtttttgcaaaggatatccgccagcgcttctaccgcgtcagaattgaaatcgtatgcataatcaagtcgggattgcacataacgcatgttgcgttgaacataatccggatattcttcaacgatcggggttgcaacagccgcttcgctcatgcattcaaagttaggttttcggaaaataccaacacacttatcatcggattcgttatatacgaaaataaatgcgttgctgttcatgatatgaacgcactgatacaccggatgtcggtaaatcactttcagtactttcttcacagaaggtttgataatgtgatttgtttcgaagcgggaaccttcggttactgtcagcagagattttacttcgtcgatatgtttaccggacaggtttgccataagggttttgtgtttctgataactactagtcataatatattctctcagtgatttacgtttcgatatgcaatataacaaagcccccgaccggagtcaagggctttttattaaaatagatctgcaaagacaacatgaatatcgtcgggttcggtcttatcgcgtcttatcttcttgataataggaaggaagaaactgtattccggttcccctttcttacgcgttttcgacttctggaggccgtcaacttccatttctacaatggccccaatgtattcatctttatgcgccatgatgtattcgcgatccagttcaccacgttcatctaatggaatgtatacacgggtaataccatcatcatcgtaacgataatcggtatcagttaacccagatccggtattcgttcgagccattccggataaatcttccaccacaaacccgccgaccttatggtcttctttagtgtgcgcgtagatatcaatgatccgtagttcaatcggggttttgtttttcagcttaacctgatcggctactcgcgaatctttccatttgaagtttctgtttttgagaatagaaccttctttaccgtcattgcggtaattgttatagtcctgcttcgcttctgcaatgttattaaccagcttagactgaatcaaacgaacagaaggcagagaaagatccaggaggatatcacgcaacaggctaaaccgctcatcataagtctgaacactttcagcttcgccgtaatacacctcatatggaataatatcccaaacaacataaacaatgtttcgctgttcttcttcggtgatcgtccctttcagagatttgtttacgatcccgttcccttcttcgcgttttgcttcggcctgttcttcttctggggtcgatactttgcgaacttcttccgcaaataacgcaatgtcgttatcatcatcgtccatgaaagcagataaagaaaaaggcatgtctgtttcaggttcaggtaatgttggtacggttccggaaggaacataaatcaattctccatccagaactacatcatatcccagataatcgcgaatctttttcagatcgatatcaagctgagttaacccttcgtactcgttacccgctctcgataccttacggtttaatgcttccagcaaatcagccatgcaacgcgcaccatcggctttaagctgcgagtaagcagggaaaatgatgcgacgtaaagccttttcactaaacggcgtagcgaggcattgaggctgttcaggaatgagtttcttccataccctgtttggtaaggttgtgccagcaccacattccagatcgcggttaatgatacggcgtagcacttcacgatcgttaatgttcactgatgatacaatatccagtaaacgatcacgcgctgcattgcctgtatatttccggcttgctaaatcttccagtaatgctttgattgcatcggaaagcggtgttgtgcctggtttcccttctaccagaggaaattgacgcacataaaacataatctgttttgtatacgtaatgcggaaaacttctttcaataattcattatcggcattacgttttaaaattgcttctttctctttggttttcagagtagacgcaagttcattaaggattgacaagatcatttagtttctcttcaatttcaaaccacgattttactaactggtgaggtgcatttgtttcttcacgttcaccacgtaacatatggaataacggcaactgactaatgacgttatgacattcgtttaagtttatcgcgagatcatcaacaaagcaaaccagacgattaccatactttgcttttgcttccaggtaacgatgagtttttgtttcaccgtggcccacgaccatcacctctttaaacgcagacgggaaaagagtattcaggttagcaattcggttaaggcttgccgttggtgttgttcccagagcggtaacggcaacgaaatcatactgcgttttcagacggttgatcacaatcaatgcatcatcatacgcattcagataacgaatgaaagaactgttattgtattcttccataaggattttagccaactgctgatcacatccgaagatttcggtcatatcacgaaatttttcatctgtaaccatttctaatgcaatatcagtaggcatgttgtgcttagacaaaaagaacgggaggccgctttgccattttacggcgatcccgtcaatatcggtaagaataacaggtttcaagatataacctcataacgatcaaagaaaagggtacttttgaatgcattcaattcacccaggaattgttcacgctcaaatgtccgataatattcaaattcgatgcacaacatatcatcatttgttacaccaatgccaacgacatcttgatgatatttctttgcctgttgaagcacgaacggatcgagatccgaacaatcgaaataaactacgtaactcatatcaacccttatacatataaacagcatctaccccagcatcaaaatcgactttatcaaagacaacgccgtttaatgcacattccttaacgtaggattcaataacaaccatgttatttgcgccgatggtaacataatacacacctgctttatagataacactctgaatcaacgttgaacgtaatgcatgttgcgcatacagtaacgctaatggattaatcgcgcctttgaacagaaacacgcattctactctttctttttcactcataacagatctctcaatcgggttaagttgcgtacaaactctctttcagtcagtacagtttcatttattttattctttcccattgaatgtgtcaaggtactttttccggttgctgccagcgcacggcgaaacccttcattaaggaataacgcattatatgcgttttcaatcaggatttgatacgcctcagaggaacgatgaatagggatacctttccagtataaggtctggttagtccaccattttttctttttgcctttgaactttgcggccttgcctaccagagtacatacatgggcttgcatatctgggttgctaaatttcaggctttgcaaaaagccctccattgatgcacattctaccccgtcaaacgtaaacggatgcggagcgaagttgcttaacgcgcatgatgggtactgactacccgaaccaatgtccatagttaacccctattgaaaagattaaatcatacaaaccgcgtccgatgataacaccaacgataattgatatccatgttttccagttatccacgatcttcaccctctttcttcccttcctggcgagcgcgtttacgtcccgctcgtactaacgaatcatagtacggacgtttgcgatcgatgttttctgtgcgatacgctttaccaaaatgactcgttttgaatccgtagtatttcatgatgcggcccagtatcccaacataaaagatactatgacaagaatcacgttatttgtttcgatatcaatcacacttccacctcatgggggttattgtgcaaaccacgggccggatcataacgatcataagttgtttcgtactctgatttaatggatacatcacagcgagtgttccattgttccagagcgcttttaatttctttcactgagtcggtgaaaaattttacaatactcgccatacactaccaccttcataaaatgcatttagtttatgtaacatttctacacgggctgattcttttgcggggctgcaagataatgtcagaaccaacccaacaggacaatcaaaagcagtatcaatcgttactctttccagacgttgcccgtgatcacgaatcatcttcaaaaaggtatcagataactcagtattttcgtattccactttatatatgaatcgtgccatagttaaccccttgcacatgaaagataagaacgcttcttgaacactttaacttcgtggcccctaccgcttgcagcggtgttaagagtttcggcgtgacgcgcaccaagtaccagagttttaaccggagtaaccggagcagcgataacgataacagcggcccaacgagcaccaacagctttatcagtacccatatcgatagcagcagaagtatttttaccagccgccagaacgtaagcacgtgcttcacgacgagttttgaagaaaaccagttcattcatgttgtaagagcgtttcataatgtcatcctcataaaagtgttttcttgtctacgggattaactataagggaatgtgcgaagggagtcaacaactttttatgtaaaaacgaaaaaagccgctacctttcggcaacggcttgatttttaatacttttcgtcaggctgaaacaccgcacgacacgcccacatagaggcttctttcagtcggtctttcgctagttgaatttgatggatacgttcaagcacctcatctaattcttcctctatcagtgaatcaatatctgaatttgatagtcgctgttcgatatcttccaggattgcacctaatgcattttcagcatctttgatacggtttaccgtttctacttttttatcagtatggggtttataacccttgatatcatcaattgccattatagactctctgtaaaggttcgggcgataacgtcgcgttgctgttcaggggtcagtgagttaaaacgcactgcataaccagaaacacggatcgttaactgcggatatttttcaggatgttcaacagcatccaggagagtttcacggcgcaacacgtttacgtttaaatgttgtccaccttccaccttaacagttggttgatattcgatctcgatctctcgctttgcaaacggagtaacgcgagctttaccgatcacagaatccatagttaatgtttttgatactacgatccgaacgtcgttaccttcttccagatagattgtacccgtatgcaaaccttctaaaatttgaaatgctttcattgtattacctttacttgattacataatacctgaatggattgaaatgaaacgccagcattgcgcgatccaggttaacagggtcgctaacttcttgtttcagcttccatccagcataaacgcgcaaacagaattgcaccttgtggatccgtagccacggtttatagacatacaacccccatgctgattcattccacatgagcagatatccatgatttacggggtttggcccaccttctgtttttgggttgcctttccagttgaatttgcttgtcgcttcacgtcctaaaacgtgatatgcgaagttataagccttgtttctccacaaccagccaacacgctgcatgtataccccaaaaccccccagatgatagcgtatagacgcccaacggcggatatgtccaccatcaccatcaatagggttatcgaaggtttccatccaccggaagcctttaggaagatgccctgttttctcgttgtagaacggtacaacaaacggggcaaacagaattgctaatactccagtaataatgtcaagagggacgagtacgatccaacttgcatactttaaaaagcgcatagacaccccaaaaataaggctatccgaagatagccatttgattatttgtttgtgttgatgtatacaaatgattcatcaaattcactgctaaccgcttcatttgtaaacggaatttcaggatttttgaaaccaccactgataagatactggataaagaataccgaagtatcaagagaaatcaattggtgattgctcggagatatatttgttctacgaacgagattgacaatctcccaatcaaagaatcgttcgctatactctttcttgctatttacttgcggcgatgcaaagaacccttgtttggaatatgcctcaagcgctttatgaagttcagaatcaaaatcatcgaactcttttacaaaaagttccatcaattttttattgcgattcgttggattgctattttctccgatgatttttctaattgccggagacatttcaaacagtttttgtaaatttttcatgttatctctttaaatttcgtatgcagagtcaatacaagattcgtaaagctgttctggcgaattctcaatgagaggcgttgttttaccaaaaatatccagatcgtaaggatcatcatccacataacattcattgaatttgaagttttttcggtagtccccatcgggcaatccatctttccattcattaaatgtcatgccataacgttctttgaattttgcgggagacatatcaacaaaaatctgtgtatattcgaccgcgttatggtatttcacagtttcacgaaatttcatataaacctcattaaaattagtgggctgggagtttctttacttcaccccgcattccggggaacctattaccggataccaacagagcctttcccgtggataaggttgcatattccgaaccatttaacggcattgcgctcgcacccaaatttggtggcaagggtaggatttgcacctacaaccaacagaatcagattctgttcctcccgcttctctaagtgccttgccttgtttggtggcccctcccgtgacttgaaccgggaacctaaccattatgagtgattagctctacctattgagctaaggggccgatatttttagaactgtttgcggtagatttcgcgaacagccggatcaacagctttggcgtatttgcatacatcctcgaactgtacgatgtattccattacttccgaagcacgggaattcagttttccctggtgagcatcaatgatcattgaagtcattacatcgatgcgggtcggtgcttcgaggatgtcgcctttgtcgaaaagttttttggattttgcgacggtatcggcgatgattgcttgaatttgtttagccatgttggatctcttattcgtaaattgcttgaatcgctttatagtgtgcggttacatatttaaccggatacttgcgagcttcttcttttgttgcctttcctgcaatcagttcaggatccggcacgtttgccatttgtgcatgaggaagcggtacgcgcttacccataagcagggttttatattcttccggtacatccggcccacatgataacactgtgccgtagatcggttcctcgccgtgttgacgaacaccagtcacaataccagaaggtgatacaatttcagttccagccgctttagcgttggtttcaatcaaaacatattcaaaggatgcttttacactcagttcagacatacatttactcattggttatttgatccggaaatgtttattcatttcttcggggtcaagttgtactacttcggcaccgtattgctgtagacgccatatccactcgatgccaccacgatcgtatttatgtagatatactacacgcttaatcatacctgttgcaacacaaaattcgatatttttcgcacattgtgagcaaggggaatgagttgtatacaaagttgcgtctttgatttgttcatgagacgccgccagcataataacgcgcatttctgcgtgtacttcgttgcgatctgaccattgtgaatgttcagggcgcttttcttcactcagtttcccgttatcatctaataagtgattgcactgatctgtacaacgatgactaggatcaaccgtattatttgcgcctacaaacacacgcccgttaccatttctcaatgcagcaccaacattaacggagacacattgagagaacttagaagcgcttaccgctctaagcataaacataatatcatcaatcttcatgatataccacgtgataaagaactttccagtaaacttgaatctttccatcatctaacactcgatgatgtgcagaaacagaactaatgactactttttctggactcggacgaaaacaacttgtgaattttcgaacaagacaagcaatgaaagtatttgggttgtcgatttcgtcaatgatagtattaacagttacttcaccgaaatgacaggggatatcatatgctttcaatgcttccaggagcaccatgctcatagagccaggatgatcaagcatctttcatcacctttagtagctgtttgataaaatcaggagtcgcttcaacgatatattctgaaccgttgattgtagtaacgcgaacttctgtctgatctttgttgatatcgtattcggcgatcggacttgttactacatcaatatcggttcccttgatgtatccgaaaacaccgccataataacgaggatctggatatacagattcatccgtgatcatcgctctatcaattacttttactttcataatacagccgcccatgtaacgtagccagtaataggatttaacaccagcccgaaagattgtgtgctgttagtatccacgtcatgaatataaacaatgtaggagtactgagaaaccggagttgcgctaacttcaaacccgcctggtgcttttccctgttcctgaattttgtcagcaattttttgacacatcaaacgaactttttgattaaaatcacccagattttctacgcgaatgcgatcgccaagttcaaccatgatgtttttatcttcacgaataacgttcataatgtaatcctcttttgttgtgggtactttaacatacccacattagatgtcaatcagaaatcaccataatcgacttgtaagcacggaatcccgtttgctcgccacattccgaccggagtgtctctatcgtccactgcaataacaggataatacttatctaaaatcttgtcaaacaaaatttcttcttttacttcaaaatccgtcctggtatcgccttcttgacgcataaaaatttcatccggttcaacaccataacttaacaggctaacccatgtatcatgtgcgcattgcggattaccttcacgcccagatacaacgatgcatttataccctgcatttttgtacaggtgaaacagttgttgaatcgggatgtttggcggatcattgatcactttggtaaagtcatacgggctacgttgccctacttttgttagcgtaccgtcaacatcaaagatcacacacttctgattgtggggattgacgatttccattgctggtacgaacccacggatcttacgatactggttaaacatttcccaaacacgcgaaacgggtaatgcatcacgaccgcgtttgtggttacggcgaagcaattcaacaatggacacatcaaaatattcaatatgaaaatctgccttgtgttccaatgcaatttcacgccagtgatttttatcactttcttttagatgcgtgttgtggatgatcacgtttttaccatctttcagagtggagataacaacgtgatcctgcatttctgcaatcatttcttctttcgctttggtgtatttgtatccgccagcacctttaccagcattatacaaagagctacgcagatcatcgcgagagatcgtaacggtattacccaattcacgggctttctcatgcgcccaggtagtttttccgctacccggaacgccaatagtcataaacagattcatttcactatctcatattcaattagttctttgttatactcattcgtaagattgagccacatatcacggttccaatcgttttctatccatagaccttctttatcctttttcgcagtataaacttttccttctgttatgtcacgaaaaaacgttttggttattttgatttgcatttctcagggtatcccaacgtacacagaacattatcggtttgatccttttgtcttttaacgtcattcatccagctacgtaaaatcaatgaatctggatatgtcaatgcaacataaggattaccatcatatggcattacaaggtattgtttcccgtcgatttctctaacgtctgcaattactttccattttaccttcactgggttaacctttgcgggtagcgtaggaagtaccttaacaggtggctgttcagcacaaccaacgagaaaaacaccaagtaatactatcattgctaatttcatttttcaaattcctgcatgtattcgtcgaaggatttgttgattttgatttcaatcaatccaggtttctcaaacaaaaggtgtttgcgccctgcatccttgactaactgctgatctttggatttttgttccacgtagataacagtattgcttgtatttgtctcttttactttcttcacatcgtcttgcaacgatttgatatccttgcgtaacgatgcgttttcgattttggtatcgactgcaatgtaaaaaagggctatcaaagatagccccacgattacaggccatacccaagatgatatcttaggcattatgaacctcatttatattgttcaggaatgaactgatcgtaatttttaaccatcatttcaatgatgcgatcgaccagtttttgtggatcggtttcttcgaagtacttcataagaggcccgaagatgatccgaccgtcgtttgacaaatccgcgcttaggctgatagcaaaatctttacgcgatttccctttgttatcttcaatggctttgaatgcttttgcactcaaacgattgagactatcaaggaaaagtttttcgaaatcgtcaatctttttcagagaaaccagatccgaactgaatagctgtttcaggtcatcgaccgtattctcaacaatatttaggaaaagatccttattgttggtaatgctatcttttgtgcgatgcaggttgacataccagtttgttttgatttttacaaaccctttcgttgtcagaacaacatagccttcgaatccttcattctgatatgcttcttttgcgaatgcatccagatccagtacttcgatattctcgcgcttaaccagatacgcacgtaacagcgcgtcagcaaacagatcatcataagggatgtattcacccgtgatgttgtgacgaacgttcaggatacgcagatccggagaatcataaccaataacgatacggtttttcggggaaacgtattccatattcaccgtatagttttcttttgcgatctcagttaaacgggtcagcaattcacgatttgccattaacacgctgtgcgcatccatagcttgttctgatttaaccgaacctttagacttgaccgccagaaatccaccgtcaaggaaagttgagatcaaggaaccatcttctttaatcatcacgtctaaaacttcgcctaattcaataggagactcgttaagcgcttcccatgcctttacctcggcatagttaaaaaacttctccatagggcggctgatgattgatacgggggtatctccatccatttcaaacatgataccgcgacattccagagcaccaggctttagccagtctgtatatgaggccatgcgatagttaaagattcgaacaggtgtacccatcacggttacttgatcaacgaagaaaaatgtttcggattcaccacacaactgcatgagttgtttgtaaagggtattgataattttagtttgtgcctttgtcatagtgctgtttattccattcagggttgtattttcgtatcatgttgatttcataatcatgatatgtattttcatcgtgagtagtcacgataagtttcacagtttttcgttttttgatagccatttccaatcgacacgtttttaagatgttactggggttggcttctctccaatactttgcattgcgatatgtgtctaaacgcttccacatatccctacacttaccaacatatactatttcatcgttaattgcaataaaataaacacaatgcctaagttcaccacacttaacaaaacttcgatcgatgcgaccacatttatcaagggttaagttgaattcagatttcatacattatatatccaaaaagtcaagtgatcttttcttaccacacaaaacattaaccacatgcgcgatgtaatcaccgtgacagggaagaggcgcacaggtacaaccaagcctctttccatcaagttctttcaattcttcaatcgtgatcgccccagtacgaacctgattctggaaccaggggataaacgctaaaatgttttctcccctggttcctgtgtgataagggttgccgaacttcgtacctctttgaatatcgacatcccaatcagttttgtacttgtttactacccgacaatcacgcgtatttgctggcccattttgcatacgcttcatcactgatttcagtattcaagtttccgacgaggtaagaacttacttcaacctcttgcggggcaacctgtacgttatcacttttgagccatttattcatccacggatacgggttagggatcggggtgaatggcgaatcaagccctaccgctcgcatacgctgatctgtaaggtgttcaatataagcgatagtgcttttcagcgatacaccttctacatcaccaacagagaataaatgttcagcccattctttttcctgttcatatacttccaggaagatagccgttgcttcttttttcagcctacgggagatttcaaccatttctggatcatctttacccatttgccacaaacgaattttactctgagtacctttctgatgcaatgcttcatcacgcgcaatcaggcgcataattttcgcgttgccttccatcttgccttgttcagcaaagttaaaggtgaaactaaacgacacatagaaacggatcgcttccagagcgttcacagcgtgcatacacaggtacagagcttctttgcacttagtggcctgtttagtgtattgctcgttataatacacgacagccggatcatttggtttatagccgctaacctgttcctgtagcatcatgatggttttcagcttatgacattcatcaatcagagtatcataataccgtgtcattgatgcagaacgtttcataatcgcttcattgcgaaggatttggtcgaactgtacagaaggatcaatgtgcaagttacgttgaatatgcgtgtaactacggctgtggatggtttcactaaacgcccacgtttcgatccaggtttccatgctcacatcggatgcaattggcaaaaatgcgaggttaggcccacgtccctgaatggtatctaacagggtttgatactgtaggttagaatcgaaaatgattttttcatgttcaggaagttttgcatactgcatacggtcagtagacagatcgacttcttccggacgccagaagaaagaaagctgtttttgcgtcaggctttcgaaaactttgtgtttctgcgattcataacgtgcaacaccagtatcttcaccaaaaaacataggttgttctaagtggttatgatctgggtttgtattcattactgttaacatgtctttacctttaaaaagcccccgaaggggcattaatcaaatcttacaacccgcgcaatcttcggcggcttcttcttcatcaccagcaccatcacgcgtattatgatagtacagagttttaacaccgtagtagttagcatacagcagatcatcaatgatgtcttctgttttaactttcccgtcttcatagtttgccgggtcatagttggtgtttgcagaaatagactgatcgacaaacttctgcataactgctacatgagacagataccctttgttaccgcgtttagccatatcccagagcagatcatagaaatcaatctggttattctggttaggcacaacctggttatagtgtccttctttcgaagatttgatactcactaaaccgcgcggaggttcgatcccgttggtagagttactaacctgtgaactactttcacaaggcattaaagcagaaagagtagagttgcgcaagccgtatttcttaatctggctacgtaaccattcccaatcgcaattataaacaggtgctaccagttcatcaacggttttgcaataccaatcgataggcagtaacccgcgagcgtatttggtatcgttgtacaatccacatgcaccacgttctttcgccagttccatagaagcaacgagaaggttaaactgaaacgcttccattagctcatgaactttgtctgtatacgcttctgagtagtcgcaatagttgcttgctaaccatgatgcatagttggtgataccaacacccagagagcggcgctgtttagctttcagagcggcttttacagggtagttctggtaatccagcaggttatcaagcgcacgtactgcaatacgtgtgagtttcgggaattcgctgatatcagcgttatccagaacgatagccattaacgtacacaatccgatttcaccagccattttatcatcatcatccagcggcgacgttgggatcgcaatctcacagcagaggttagacatacggacaggaaccgtaaaactaccctgttggttgacgtgatgagtgttgaaaatgtatttgcgtcctgtctgtgcgcgttcctgtgctaaaagttggaacaggtcgaccgctttgatgcgttttttacgaacagttggatctttttccaggctttcatacagttcttcaaatgcagtctgatcagcttcatagaacagatcatacagacgatcgttagcgacatccggactaaacagcgtaatgtaatcacgattcattaagcgtttatacatcaactggttaagctgtacaccgtaatcaagatgacgaacgcggttttcttctacgcctttgttgttcttcaacaccagaaggttttcaacttccagatgccagaaaggataatacaatgttgcagcaccaccacgaacgccaccctgtgaacaggatttaacagcggtttggatatgtttccagaaaggaatcacaccagtatgaacagcttcaccgccacggattttagaacccattgcgcgaatatgtcccgcgttaaccccaataccagcacgttgtgaaatatacttcacgatcgcagaggttacagcgttaagagaaccaagagaatcacccgattcaattactacacaactggaaaactggcgcgtaggagtacgtacacccgccataattggagttggtagagacagtttgcgatcggaaattgcgttataaaaatcaatgatatgcgtaacctgtgctaacccagtttcttcctgatgcagacacattgcaataagcataaacgcatactgaggggtttcaaagatttcgccagtatcgcgatcctgaaccagatatttcccgattaactgttgggaaccagcatacgaaaattcaaaatctttatcatggtcaattgcacgttcgaaaacttgaatatcttgcttgctgtatttttccaggatctctttatcgtatttccccgcttcaaccattttaacgatgtgatcgtagaacgggataggatcgaactgaccgtaaacgtctttacgcaatgcaaacatttcaagattcgatgctacgtattgccaatctggttctttaacagaaatatgatctgctgcatacttgatagcgatacgttgaatttgtttggtagtcataccatcgcggatcagttctaatacattttcaaggaatgcacgaacatcgatattatgaccatcacaggcccacttgagcactttgtatattttttctttgtcaaacggctggcgtacaccagaggattttactactactttaatgtcattcattctcttaccttgttaagaaaggggccgaagccccatttttcatactgccatttcagcttttagagagccgtgattatgatacccttctaaggttatcgagtcaaagaattcttgatctaaatcaagtaagctatttaccttcggcatttttagaatcggtaatggcattggtgaacggttaggctgtaaaagttcttttgcctgttcaaccgcatttttatagatatggacatcaccaccagtccaaaccagatcgcccacttcgtacccgcaaatatcagcgataatatgcgtcaggagagcataggaggcgatattgaacggcaaccctaagaagacatcaactgaacgctgataccactgtagagacagtttaccgttgattacaacgaactgaaagaaacagtgacacggacgcaatgccatatcatcaagatcaacagggttccatgccgaaacgatgatcccgcgatcgtctggggttgatttcagttgttcaatgacttttgcgatctggtcaacaccactaccgccataataactatcatcatccccataaagagaaccaaacgaacgccattgatgaccgtagattggccccagataaccagaatcgtatcctaaatcaatagcttgtttttcatagttatcatcccagattgtgcgcttatcgctattttcaccccaggtcatccggcgaagttcttcaacgttggttgaaccggacaggaaccattgcaattcatgcttgcacggtttgaagaatagttttttacaggtagttgcggggaaacctctgtttagatcccatcgggcttgtgcgccgaaaatacgaatagtacctacaccagtgcgatcagttgattcaacaccgttatcaagtacaagtttaataatatccagatattgtttcattttatacctttttatatcgatcgactatgattttttcaatgcgttcatgttctttgatgtactgagtttcgaaatcagaaaattcatattttaacaatgcatcacccaattcagaagcagtaaacgaaacatcgcgtttaaatgcaggggcattatatacatgatgtccgtaaatgtgtgtcaaaactacttcatcaaccattttattattgattgaatctaaaagcaaccccttaccaccaatgacacacacatttttatctgggtgtgttgcttgcattgtaccgatagcagcagacaacccgccaccgtggatcacgtaatcagcaacctcgccttttttggttttcaaaaaactaccggaaccagacagaacgcaatgaattctaccaggcaatttacccggaagagaggtaaacgtatttgcacccataatcagaacgctatcggcggtttcttctttgaagttctgtaaatcttctttacagtggccccacggcaagccttgctgatatccaaaagcgaaatcatcgtggtagatatcatgccccagcgcaaacaccgcttttactatgctcatattgcgatccacattttgttgtcttcaacagttacaatatagcctaatgcttcaatcataactttcagtttttctttgtacttctcatcatatccgcgaatcttctcgaattcaacagagaaaatactacacccctgatattttgcattgatcacgcgagattcaatatcaaaaatcatgatatccagaggacaccaatcaacagagtgaagtttttcgcgggttagtagtgttgtgttcttagggagtttcattccgtttcctgttcattcagccatgattcgatacgagatagttcttcatctcgcggggtaaatccatatgatgcgtcgatcatcccaatctgatcccaaacatcaatttccaggatctcagtcactggaggattttgtgagatatggtcacgacatacagcaagagcggtattgatggattcggtgacagtcagagtgtcaccctgtacagatacttgaataatcattcagaactccatgcatttttcaaagtaaatctttgttgggaattaataatcgtagcgcgaataacagcaagtttcatttcttcaaatttatttcgcgtcatatacaaaccaatcaaaggaaaatagagcctttcccattcgtaagtgtcgcttacttctttaacagcattgattaaaatctcagccatttgaaaatcggtaggaggaacccaaccaagattaatataaatccgtttttgtgtaccttctttcagattttccaaacgtaaccatgttggacaactcataatattttcctcaaataaaaagggaactgcgttaacagttcccattatagttcatttgattagtaagtcaagcgccacaattgaattgctgcatcaacttccttcttgatatcttccggagtgtctttgcgctgtgctttgactaacatagtcatcattttacgaatagtgttgttcatattcgctttctcacgtgctgcatgaacagcctgtgatttttccacttccggtgtatctttcttagccgcctgtggtttggtaggctgtgcgccgatttcgtctttctgtttaggtgctttttgctctgcttccttcttcacatgaggcgcggagaatttacccgctttgaagttagaattcatttgatctaaagcgctcttaacagtgttccagtcagagatcccgcgtaaagatttcagagtatcagtgagcaggctaatgcttgcgcctttggtatcttctgcgatatcgatgcctttcaaccactcaacgtgtttctgaccagagtacgtgaaattaaagctactgaatgagtagtatgctttacggtttacaacaatacgcttgaagttgatagtaacaccagcaccgttatcaaattcaacataaccgctggtaggcattacacgagcaccaatatctttgagtgctgcgaagtattcctctttaccaatacggttaactgtgcgcttcggcttctcttctggttttggtgcggcttcctgagcagctacacgtttaacaaaagatgctgaacgatgccccgctgcaaactctgcgttcatcttatcgatcgcgttcacaacgccttgaacactcggtttcagtttctgcaactctttgaacgtatcaacgatcatatccaggcaagcgccgtcctcatcttcgaacatggttccgcgaagttgtgcagccggacgatacttagatacagcaggatcatacaccgcgctaaacacataagcacctttgcgcatgaatacgtgacgatagaaacgaactttcagtgtaccaacttcaacaaagatatcgtttccgctaatgtcagcgcctaacagcttacggaatgatgcaaggtaatcagcacgtttgtatttgatatttttctgtacagggctgaaaatgctttccagttttttagacgggaacaggctttccggagtgatcttatctgggtttttgccccattgataatcacggcttgccattttgtgttttttagttccaaccagtacaaaggtactaacagaaacgctacccagtgcagatgaatccggagcggctaacccttgtccattcggaggggtgcagttgaaaccgaaatcaaagtaagcatcaccagaagtgaaacggaacgaagcataaacaccgtgactaccttttgttacttcctgtttgaaagtggtaggcaatccagtgtatttggtgaagtattccgcaaattcctgtgcgttaaatttggtgctgaaatagtttttcgccactacaaagtaagcatcaactttttcttcccattctttcttttgacgtgcataacgtgcgcgaacatcaccagcagtctcagaacgtgcgccactaggcccagtttttgtaactacgtcgtaagcctggttaattttctgcattaattcattgctaccaccacggtcggggtgattgcgtaaggatgcacgtttgaagagtctggacatttcagcgctggtttcgctaccagttgcgcccaaaactttcagtgcttcctgataagtcattttggattcagtgatcatttattgttcctcaaataaaaacaaagcccacgtttcgttacatgggctactttactgtatttatggatttcggtcaatagattttttcgaggaaccaaacagaacttttgttgttcttgattcgcgtcaactctatagggttatctttgaatgcttcctcaacatctttcatagtaactatatgtttttcttcaagaaaattgttgtggagataaaaccgctctatttccggagcggtttctaattcaaattctctttctaacattatgcacctcgatcattgatagtacactttgtgaaccgtccaactttctgcatggtgatatgtcgatcgaagtcttgcggatccagatcctgatgactgataatgatagtgttgccttcgatgctgtcaagtaaagttttgattgcatatgaaccttctcggtcaagtggcccgtcaaaaacttcatccaggatcagaagggataaatcaacaccagaaattttactggttacatcgcgccaggtgaacagtaaagcaaggttgatacgtgctctttcgccttgactgaacgatgcgtaactaaaatcattacgacccagcgatttaatcgattcgttaaattcatcatccaaagtgaactgataatcagcacccaacagatccagatagtacgcaatctgtttattgaagtaaggaatataacgtttaacgatgctcgccttaacgccggaatctttcagcagatccgtaacaatacctctgaaatatttttccttgacaaatccagaacgtttagaatcaagttccttttcatcttcacggagtttttcaactggggattcgtcgatcaccacgtcttcctgtgctttatccatgatagcccgaacacgtttagccgctgcaacttcattttgaagtgtaccgcgtagtgattcgtatttggatttcagcccatttagtgtacgttgttgtgttagtaaatcatccatgattttctgtagctgatcttgcttgttcttaatcagcgtaagtttctgagtaccatttttaatgttctcggcaatctcttccatgcgttcaggagtggggctaattggctgtttacaggccggacattcgccacccttgcgatacatcacctcaagacgttgcaactgttctacgttcattgagagccgcgtataaccatcacgcaatttttgaatatttgctgtttggtcttctccattgatcacgcattctgcgatctggctttgcagttcgaccaattgtgctttgatttgttttgctgtttctacgtgggaatcgtagatatcctggtaacgcgccgtattctgatttgcttttgcccgttgttcgtcaatgaacttttgatgtgttgcgatctgctgttgtacgtgtccaatctgcattgaaagcgtatccagttcacggttaacaccacggatgtatgatttgtttagtttgtccatttcactgataatagacagagaaagcaaatcttcaaccaatttacggcgatctggtgttttcagttccatgaaaggtacataaccagcagtacccagaacgataacctgtttaaagcccaccaggttaatattcaacattgattcaagctgtgactgataatcaccagcggctgaatcttccggcagtttttcgccattcttccagatctcaaatactttcggcttttgtccacggatgattttatattcatcattgccgtattcgatcaacagttcaaccagacattttttcttgttgatactgttcaccagttgcccgactttcagatcgcgaaatgacttaccaaagagagcatatgtaagcgcttcgatcatggtggatttaccaccgccgtttttacccgtaatgagggttttctttgctgaatcaaaatcaatgacgatcggtacgttaccgaccgacaagatattttgataagtcaatgttttaaatttgagtttcatcaattatcctttgggatatatcactaatcatgtttgtaatcgtgctatcaaagcagtatatcacggaatcttcatccatgctattcaggacagtaaatgtccaaacctttgtttcgtgatagttgtctttaatcagagtgaaccccaatgacacatactcattataggaatcctgctgtactgcaacaatcacatcaaatccaaacattttataaagggctttatatcgcccttcttcgtttaaaatattaacgtaatcaactatttccattgctcgtaacctctgcatacaatgcactcattattgcagatacttcggtcttttcttctggagtgatctgcatgttgttgatgtactcactaatcaatccagatacacttttgatttcaaaatcagtatcaacttctgaatcagtgatcacacgatcgacaatgttcaactcataaactgtttcttccagttttgtttgaaacttaggcaaatcgttatcaacttcgcgaacaatcaaacgaacagagcaatttttgtaatcggcaacatcaacatctttttgatccggataggtgatccggcgatggtggcatactgggttagcaatgaaagttaattcacgtttaccgtcgccataagatagctcatagaagcccctggtttcgtcctcatcgttcgcgctcatggtaagaggtgtaccgatatagaaaacgttagcgccttcgttagcgtgatgatagtggcctgaatacacgatatcatatttctttaagaaatccggttcaagcccatgatccgctttactgttcttatagaaatagtatccggacagttcaaagtgtcctaagcagtattgagattttgactttttgatgaaatcaaaaatctgctgtgtattttcttgacaaatccacgggatcaaatcgattgattgtagcggagaagtatcaagatttactgtcatcggttcatcaacaacagtaaagcaatcatactgatcaagaatctctcgcggtgagttagggcggatcttgtctttaaactggcaatcgtggttcccaaccagaacatagatatgtaatccggcttcttccagtagtggcacaatacgttcacgaatgaatttcatcgtggtttgtgtggtggcctttcgcacatcaaagaaatcaccagcatggaaagcctcggtaatgccgtttgctttgcagtgttctacgatttgcacgaatacattgtataggttttcttcattccaggggttgtcctgacgcaagccagcgtgtgtatccccgatcattaagtactttctcataagaccctcatagcccctttcggggctacttgtttgttagtgcttctgttgtgaagctacgatatttcgaattgatgctagtgaagtgttccacatcgtatcaatgaaatcctctgtatacggctgtttgagcatatcacgaagtttcttaaccgcatacacatactgaaccttattacccctgaatagggcttcctctgcgtgtctacggaggcgtttgatctcagtccggttcttcttaatgaatttttgtgctcgcttcaatgcgtcggcttctacacgtgcctggatcttttgtcgaatttcctcttccggatccacttcttccacactggttagtacttctttctcttcatcaatcataagtgatctccatgatcatagtttcggcgtttatcatataagacaaaaccccttcttctacttcgaaatcggggtttcttacgtcagttggatcgatgataaccgggattcccacgttttgcaactctaattttacgaagtagggtagcaagtcaatttcgtaatcgatatcagttaatattttgtttaagtcaattattgctttcatagaaaatcttccaatgttgggaatacttccgcttccttgtctttggttttggtggcggaagcctcgtactgagatagtttgtcatgtagatcttgaatgaaaccttcgtctgcaatactaaccatatctgaatcttcacagtcgtaaacgtgctcaaggaagaatttatatttcttcgcgttctcttttttctcgtacagaatacgtgttacgaatgcttgccaacatgctttgttaatgtaaccgtaaacgttggtataacgagtttcatcgaagttatgcagtcctgagattgcagcggaaattccgtcatcgatcatatccattttccaatcttcggaataacggttgaagttgtaacgacgtgatagcccgtttgcaatatccataatagcagcccccaactcattaggcattttgcgatcacctgtttcggtgatttgctttttccatgcacagaggatagggtataatttttcattgtctgcgtagatattggttgtttctttagtcatagtattcatatttcctctttgaagttaagaatattatataataactgtagacaaaatcaaatttcattctatattatttaaggttaaagtagatctaatgatctatagatcagatctaaattatataaaatttattgattttagtacttgacctacaatgatcattgtagtaaaataattattaattaataaattatagatcataaatttgatcagatcaagtattattgatcaaaatttttatggtcttttgtattgacttcatttcgtaagttactacaataaccccgttctttgaaaaattgaggtatgtatgagcagttttgcaagcatgtttaacttgaacaagctgatgcaagatgaaggggaacccgatgatactatggtcatcgatatctctaacatttccatcgctacactgatgaacaacttcaaaccaaaggaacaagcatccatcacgatcgaaatgattcgtcatctggtgcttgacactttacggtttaacgttgtaaaatttaaaggtgagtatccagaaatcgtgattgccttcgatgacagaaattactggcgtaggcaaaaagcctggtactacaaaaaacgtcgtcagatcgaacacgaagaatcagaatgggattgggatcgtctgaacaacttcctgaatccggtgtttgaagaaatccgtcagaatatgccttatctcggattaaaggttgaattcgcggaagctgatgatataattgctgttgttacgaaaaaagctgttggtgaaggtagacgagtattagtggtttctgctgatagcgactttacacaactacagaaatataacggtgttcgtcaatggtcgcctacccagaaaaaatgggtaacgcctaagtacggttcgccacgtaacgatctgcgatacaaaaatatcaaaggcgataaaaaagatagtatcgcttgcattaaaattagaaatgattatattgtgacgaaggttgaaggtgaacgcgccccagcggtaaaatcctctgagttagaggcatggctggaggcagacgatccgacaacattgatgacccctgaatgggccgcacgttacaaagaaaatgaggaactacgcgatttcgaatttataccaaaagatattgaaaattcgattattgaagcgtataatactccaaaatccggaagtaaagccaaaatggaacgttacttcatggataacaaactttcccgtatgttcgaaaaactgagtgatttttgaggtaacaaaatgagtgtagaatttttacaaacaaaccctgatgtagcaaaacaggtaaaagaactgatcaaagaagcatccaacgtgaaaactcaagttgagatcttcaacggcacgttcaaggatatcaaatccaaagcgaaaaccgatttcggtatcgatggaaaaaccttcgggaaactgttcaaactgtatcacgaacaggcccgtaccgctttcgaagaagaaaacaacgaactgatcgaactgtatgatatgatcgataaggcgtaaagcatgatcggaaataagaccgaagtcggtttgtatatcgaaaatctggttgcctctgagggggcaacctacatggaagcaacgctacaatggatggatgaaaattctattgattatgcgatgctgaataaaacggttcctcgcgcgatccttgataagattagcgacgaagcgatcaaaggaaacatgcttcgcccatcggttgcgcttgaacatagttcatcaaccactctggacggcttcatgtgagattcaaagctccgtttgctgatagcgaggcgaattcacggcttgtgcctttgtctgtatacaagttatatctggcgatgaaaactcatttccaggggcgttttgatgtccttcaatacaactggcagatcaaagttagtgaaaacgcctttaacaagcgaaaggatagatatttctttgtaaaattagctcaacgctttacattcaaagaaatctattttatattcctctccaacttcgtagccaatccggatttctgggtaggcgatgttgatgaagatagtattgtcttttacaggcagtacataggaaagttacaaagactagataacgtgtttgtggatgacgttaaaaacgtgtacgaattcgccaaaatgaaagagatccccgtgtctctggtgttcaagtacagcgaaaaatcatcaacgtcctacataagcaaacttgtcctgtcaaatgtgatatcttacgaatcgtttttgatttttgactcatttttaggtatcataaataaacacgatcaagtagctgatgatattatttggtctgactttagcattaagttaaaggcatacagaaaaatatttgaccttactgaaaaagatatcataaaatatcgaaacttaatgaaacaaacgttaatcaaactaaactaaacgagaaaacagaatatgagcagcatttttaaacgtcaagatcccgctaaactccaggcacaggtagcaaatctgaaaggtggttccggcttccagaaagatgagaaagaatggaaactgaccctggacgcacagaaaaacggttccgccgttattcgattcctcccagcacgttccgatgatgaactggcgttcgtccgtatcgtgagccactctttcaagaaaaacaaccagtggtacattgagaactgttcctctacccacggcgattatgacggctgtcctgcatgtaagtacatttccgaaaacgatctgtatgagaaggctaaagccaacaaaaacgggccagaagataagctactgagccagatcggtcgtaaacaaagtttctgggctaacgtcctgatcgttaaagacccaggcgctccagaaaacgaaggtaaggtgttcaaataccgcttcggtaagaaaatcatggacaagatcaccgccgcaattaacggtaatccagaacttgatgaaccgggtattgctgtaacctgtccgtttgatggtgctaacttcaccctgaaagcgaaaaaagttggcgattggcctaactatgacgatagctcgtttggtgttccggctaagatcaaaaacatcgacgatgaagaagttcagaaagcaattttcgaaggtatgagcgatctccgcccgattaccgctgaaagcgaatttaaaccgctggctgacctgaccactcgcttcaataaagttatgggtagttcgatcggttctgctggttccagcgcttccgctgaccttgatagcgaactgagcaacttcgataacgaaatggctaagtttgacaatcagacatctgatgtgaaatcatctggtggtgttgcatcggttccggtaggcgaagatgacggcgtaccgttcgacctggatgattctgatacctccggtgatgacgacctggataaactgttagacatgtaatacaagcgggggcttcggcccccactcaaagaattctaagttagagaagaaatatatgaatgaaagtaatgtttttgttgactacatgaaccgcgtccgtaaatcctgggttgctaaactctcggacgaaacaaaagaactgtttaaagctatgcctcaagaggaacgttttaaacactatcgtgacattgatgaaaaagtggttgcggaacatcgtaaacttaccagcgaacgccgcgaagatccgaagcgtacaaccgttaaagaaatggctgatatgcttgacacagcagcggaaaccgttgtaaaatcacttattaagtaacacttattgaaaactaaaggctgaatatgaaattctctaaacaaactattgatatcctgaaaaacttttctcaaatcaactcttcgatcatgctgaccaaaggttcattcatcatgacgaaatcaatcaacagcgttgtatacgcagaagctgaaattgctgatgtgattgatgaagatgttggtatctacgatctcaactcattcctgaacatgctgaacatcgtcggcactgacgcggaaatcactcatgatatttccactggtgaaatcgtgattcgcggcgacaagatgaagatcatcgaacgttcagcagacgcaacaacgatcccgaaaccgaaaaaacgtttggtgatgccagtagcagatctgattttccagattaccgctaacgatttcgaaaaactgatcaaagcgtctcgcatgatgaaactgaccgacctgtccgttgaaccgattgatggtaaactggtcatcaccgcgaaaagcaaagaaagtcaatcaactttctccgttgaagtcggtgagtatgaaggcgacaatgttttcaatttcgatatgaagattgataacatgcagttcatcaacagcgattacaaagtagagatttcctccaaaggggccgcaaaattctcttctgataacggcgttgcttacgtcgtcgtacttgaagcaagtagcacattcaagtaagatagttttaaggggctacggcccctttcttttacaccatttattttgaaggtatattatggaacttagtgaaaatattgaaatcatcgaaaccaaatacggtaaaatctcccgatctcctgatgaatttgcatgggatcagcgctatcgcccaacaacgattgaagagtgtattttaccttctggtgacaaagccgctatgcggggcataatcaaatctgggcgtgttgagaacatgacccttgtatctgattcccctggcactggtaaaacgaccctcgcgcttgtgttggcccgtgaggttgatgctgaggtgttctttgtcaacggttcgaactgtggtgtaaacttcattcgtaatgaactggatcgttttgcttcatcaatgacgcagaaaccaggcggaaagattatcatcattgatgaattcgatcgttctggtatggcggaagcacagaaacacttgcgtagctttatcgaagcatacagtaaaaacgtttctgttattgtaacagcgaacaacattaacggtgtgcatagtgctctgctttctcgttgtcctcctgttaaattcggtgttccgtctgatgctgaacgtatcgaactgatgaaacagttaatcaagcgttgtttcggtatccttgaaatcgagaatatcaagtatgatcctaaagtcattgcagcgtttgttaaagagcattatccggatgcgcgttctattatcaaagcgattgggttctactcgaaacgtggtgaaattgatgcggggatcctaaatgagatcgttggttctgatgtgtctcatatcattaccctgttgaaagaaaagaactataaagggttgcgctctgaggttattaaatatgcgtcagaatacgatacctttatcggaaaattgactgatacgatttaccctatcgtgaatcaggattcgaaaatcgcactgatccagattgtaggcgaaaacaacgcgcaatacgggctggcgatgaataaagaaattcatctgcaatatctgttgatgaacctgatgctctctatggtctgggaggcgtaatcatgagcctggcggaatttctggatgaagaagagttatccccgcatgaatccgcttggctttctaaagattgggataaggttgaagaactggtcaaagagtacggcaaggataaagaaaacaccttgtttaacatcatagacgaaatcaacaacggcaaaactccgttggttatcgatgaagtgtatgataagtactttgtagacaacgcaatgagccagcacatagacacgatatacaacgcgtatgtgatgaatctggtaggcggtagtatctctgaccaaatgcactataactattatctcaactctgttaggaaggctaaacgcttcggtgcatgggctaaactatcggaagattttgaagagaaaattattatcgaaatccttcgcgaaaaatacagtgtaaatacacgtacagcgatggaatatttgcaggaacttaaagacctcggaatgatcgaggattggaaaagaaaacacgcaaaggtcgctctgtctttgttgggtattgtgaaaaacaaagctgaacaaaagaaattggaaaaattgattaaacaatggtgatgtatgttagaaattcaactaatcagcgacgattcttttttaaagatccgtgaaacgctaacccgtattggtattgcaaacaacaaaaagaaaatgctctggcaatcgtgccacattctgaaaaagcaaggtaagtattttatcgtgcattttaaagaactgttgaaactcgatggtcgtcaagtcgatatgacggaagaagacgaactacgccggaacaacattgcgcgacttctcgaagagtggggcatggttaagatcgtaacccctgggttgaagtttgcagaagaaaacaacttccgcgtactgactcactcgcaaaaagcagattggatcctcaagtacaagtaccggatcggtcactaatcaaaaagcccttgcattcgtgcaggggctttgttatattgggtgtacaccattgagagggatatattatgactattaacgaaatcatggattcaatcaaatccaacgaaactttgatcatcccgattgtaaaagatgacatcttgttatcgttaacttgcaatctgtcagatacccgcacttacagctatgcacaacactactttcctggattttacgatcgtaacatttcagagtacacattgttatgcaatcaagttgaaaccactcatttctatgagcgtattaaaaaatctctggacttgatccaacaagcaaaagaagtctttatgaaaagaatggaggacgcgcaatgatccgcacttacatgaataaaattttcgcggcccgtatggataacgttattgatcaacgtgcttatgatgatctggtttcccttgcaacctgtcaactggatgaacatacagtaacggaaaggaaactactggttaacaaagctatcatgatggttaaccagggaattgcagaagcaaaatatcatagtataaattccagtatttttagcatgttattcgacgggtttaaacttgaacgccagcttgttcaactgagaaagatccgtgacttgttagcagaagggttgttggttttagaacatcgagtaaacttgaatttgctgtaggtagtgttacaatggaacattatattaatggagaatacaagatccaatgaatgaattttacctatcagttgaacaaatgggagataccatttacgagcgcttcgttgactctaacggcaccgaacaggtacgtaagacgaaatatgcgcccgtaatgtatcaacacgctatgaatggcgtagaaaccccatacaaagacatttacggcaagccttgcctcaaaaaacagtttgacagcatcaaagaagctaaaaactggatgcagcgtatgcgcgatgttgggatggaagcgctaggtatggacgattaccgactggcttacatttctgacatgtaccggaatgaaatcgaatacaaccgcgaacacattcgcattgcttctattgatatcgaggtgaccgccccagaatttccggatccgcgtgaagcaaaatatccaatcgatgcgatcacccattacgatagcattgaagataaattctatgtatacgatctggttgagggtggccttgcggaatggtgcgcggaaaacgttgatcgcaaagacattagcgaagaagatttaaacaaaattgtttatcggtctttccagaccgagaagtcgttattgtctgcgtatatcaaagattggaaagagcgaacccctgttattgtaaccggatggaactctgacaaattcgatattgcatatatcatcacgcgatacctgaacattttcggtcaaaacgtggtaaggcattttagcccgtttggtaaagtaaccgccagaaccactactgacgcttacggcaacgaacaattaggatatgatattttcggcgttgctcaaatggatggtatggcgctgtataagaaattcagctttaccccgcaaccgtcttaccgtctggacgcgatcgcggaatacgaaactggtaaaaataaagttgagtatgaaggttccctgtctgaactacgccagcgcgatcaccaactgtacatcacgtacaacattgttgacgttatccgcgtacttgatatcgacggtaaacgaaactttattgaactggttctgtctgtagcgtactatgcaaaaattaacttcccaggggttatgtctccgctgaaaacgtgggacgcgatcatttataactctctgcgtgaagataaggttgttattccggaaaacagacgccatactaaaaccccttaccctggggcatttgtgaaggatccagttcctgggccttacaaatacatggtatcgtttgacttaacaagcctgtacccttccatcatccgacaggtgaatataagccctgaaacgattatgggaagttttgcggtacgtgctcttgaagagtatattaataagaccgcgccgcgccctagcgatgaatttagctgttctcctaacgggtggatgttccgccgtgatatcaaaggcgtgatcccagtagagatcaagaaagtatttgatcagcgtaagatgtggaaaaaacgaatgatggcgggtgagcgaaatcttgaactcatcaagcacgaactcgaacacttaacagacgcgcataaccaaatggttgatcctgactttgatttctatacagatttcagtgatgaatcgaaagcagttctgaaaactcttacaaaacaaatgcttaaagcagttaagcgcgtgtgtgagaagaagatcgcacaagcgaacacagcacagcttaaccgtaagatttctatcaactccctttatggtgcgttgggtaatgaacacttccgatacttcgatctacgaaacgccagcgcgatcaccatgttcgggcagttggctatccagtggattgaacgtaaggtaaacgaataccttaacgacctgtgcggtactacggatcatgcatatgttcggtactgtgacactgactccatttatgtttgcatggataacgtgattgcaaaagttggtggtgaggctaaatttaaggataataaccattgggttgacttcctggatcgctttgctaaagaaagaatggaaccgatgatcgataaagggtatcgtgaactttgcgaatacatgaacaacgtggaacacctgatgtttatggatcgtgaaatcatttctgggcctccgttgggttccgaagggttgggaagtttctggactgctaaaaaacgatatgcggctaacgtgtgggactccgaaggaacccgctatgaaaaaccgaaactgaaaatcatgggtatggaaacacagcgatcgagtactccgacctctgtgaaagtattcctgaaagaagcgatccgccgtatcctgcaagaaggtgaattatctttgcacgaacattataaaaagttcgaagaagaatataaggaacttgactacagggaaattgctggtgtatcatctgccaacaacatttcgaaatatcgtgatggggctggctatccaatcaagggaacaccaaaccatattaaaggggtgctgttctttaaccgtttcactgctggtattgatggtgttacgccaatcatggaaggtgaaaaggtaatggttctaccactaagggataaaaacccgtggcaagccgattgcatcgcgtggcaatccggaaataaactaccgtcagagatcgaaagtgatattctggcatgggtagattatccgggtatgtttgaaaaacatgttattagtccattgactaatatcacggaagtatgtaaaattgattatgaaaaacgtgccagtttaaacgacctgttcggtgactggtaaactctaggggcttcggcccctttcattaactagtgagatatatagaatgagaatgaataaatcggaaaaattaaatgtcaaacaaagcactactaaaaaaactgatcaaaaactcgaatagccaaactgcatctgtactttctgaaagcgacgtattcaacaatattaccatcacgcgaacccgtgtgccgattctgaatctggcgttgtccggtgcgtttaacggtggcctaacttctggtcttacccttttcgctggcccgtccaaacacttcaaatccaacttaggtttgctgactgtagcggcttatctcaaaacgtatgaagatgctgtgtgcctgttctacgattcagaaaaaggtgttactaaatcctatctgaaatcaatgggtgttgatccggatcgtgttgtgtatactcgtatcacgacggtcgagcagttgcgtaatgacgttgtaagccagcttaacgcgcttgaacgcggtgataaggtgattgtattcgttgactcagtaggcaacacggcaagtaaaaaagaacttgctgacgcgctgtctgataacgataaacaggatatgacgcgagcaaaagcattaaaaggtatgttccgtatggttacgccttatctggctgacctggatatcccgatggtttgtatctgtcatacctatgacacacaagaaatgtacagcaagaaagttatttccggtggtactggtttaatgtattccgctgatactgcgatcatcctgggtaaacaacaggtgaaagaaggtactgaggtagtgggttatgatttcatcatgaacatcgaaaaatctcgattcgtgaaagagaaatcaaaattcccgctgcatgttacctatgaaggcggtattagtatgtattctggccttctggatctggcaatggaaatgaactttgtacagaccgtaaccaaaggctggcgcaaccgtgctttcctgaataccgagactggcgaactcgaagttgaagaaaagaaatggcgtgagtcagaaacaaatagcgttgaattctggcgtcctctgtttactcatcaaccattcttgaaagctatcgaagaaaagtataagatccctgatcgtgaaatcagtgatggttccgcgctggaagatttatacagcactgatagcatcccagatcctgatctggatgatgacgatatcccagaatcatttgatgatatcgaagaagacaacgaaattttataaaaaactatggggcttcggccccataaccgaggcaatgtatggatatcgagagcaaagcaaagaattatattgatgaagcgatgaaagatgttattcaggaacttctgattaacgatgaaaaaggtgttgcgcatctggtttatattcataaggtgttttgggatcatggtctgaaagtagaattcagtaccccagacgaagacaaagaagcgttgatcccgctggtgcatgatgcaatttatgcacagattaaagagcttgaaaagggttcagttgtcccaaagcctaagctgacattatgggatgtattcaaacaaaaggtttacaactttttcatgatgttcagcaacctggtataaggcaatacaatgatcgttgatacaatattttctaacctgatttataacgggacgtattttgtccaagcatggcctcatctgaaaaaggaatatttcgaaggcaatgcacaagttttgtttgacctcattgataaacatgtacaggaattcaacggcattccgtcaaaaactgctttagaggttgcgcttgacaaacgaaatctaagtgatgtagtctacgaagacacgaaaaaggcgattcagtcgctgaaaaatgcgccagaagatttagattggctaatgaaggaaacggaaacatattgcaaagacaaagcaatgtatcgtgctctttctcgcgcaatcgagatccaggctaacgcagaaaaaccactggcagaacagaacaagaaacttcctggtgttggggctatccctgaaatcatggaggaagcattagcaatttcattcgatagttcagtaggtcatgactatttcgaagattatgaaaaacggtggatgctttaccaatcgaaggcgatgaaaattccgtttggtatcccgatcctgaacgcaatcaccaaaggcggcgcggaacgtggtacactgaatatcatcatggctggtgttaacgttggtaaatcactgggcttatgttctcttgcggctgattatctgcaacagggtaaaaacgttctttacatttctatggaaatggcagagcatgtttgctctaagcgtatcgatgctaaccttcttgatgtgactatggatgacatcgacgaagggaacattacatacgcagactataagaacaaaatggagcgccttaaagcgggtaaggttgggcgtttggtggttaagcagtaccctacatcgggtgcgggtgcaaaccactttagagcgcttgtgaaagagcttaaattgaagaaacagtttgtgccggatgtgatcattgtcgattacctggggatctgtacttcaacccgcgttaaaggtgctgaaaatacctatattctggttaaagcaattgccgaagaactacgcggtcttgctgttgaaactaataccgtaatgtggacaggcgcacaggttgggcgttctgcatgggatagttcggatgtgagtatgggtgatgttgcggaatccgctggtttacctgctacggctgattttatgttagctgtaatcgagacggaagagttagctgatcagggtatgcaactgttcaagcaaatcaaatcccgttatggcgataagaacactttcaacaagttcaagttggaagttcgaaaaggtaatcagcgctggatggataccgacaacagcgaatacgggtttaaatctgactaccacggcaacactatgcctaaaacagtagaacagacacaaggcccgatgattaaacaggctgaatctacccgacgtgaaaaaatggcacagattgcaaaatctgacattcaattttaattgacaggggcgaatagccccataaagaatgtaaggtaatgaaatgactaagactataacgattcctattccggctatcaaactgctgactggactaactctgatttttgcagccgctaaagtgtttggcttctcgcaaatgtcatggttctgggttctcttcccagttctcttacccgtctacattgtagtaggcgttgtgttggtgggtgctgcgatctatctgctgttctcactgcttgccagtgacaaggccgaagatatgtatcgctgggtaaaagccaaatacgaaaaacttttcaaaaaatcgtaaaaaggtattgacctgaatctccattgtggtaatataactcacgtagacaagatactgagttaaacaaaggagattcaaaatgaacgtattcaacaacccttacaacgaaatgctgaacccgaatgttgatttcagcgatggttattttgacgcaatcgtaaacagcatcaaaaacaaaggtttgctgttagcgatgctggaaaaaggcaaagatgacgttgaaggaagtgttgatttcctctggaacttcctccctatcgaacctggtttcaaagttggttgtaatgaggaacaagcgaaaaacgttcttcggtatctcatcaataacgcataaaaaattaagcccctttcggggcttttttgtatctataggtattgcattctttcaaaaaagatgataccttaatcataacaaaggaggacattatgaaaatcgcattcgttatcactttcttacttgcagcactcaacatcgtaactggtaattcttttagttggtgggtggtggcaatgccttacattttcgtgtatagcaaaatcatggtgattgctggtgtgaatcttgtccttgctatcttactatttgtattcgccgccctgaatggtgaagcaggttctacctggaaagccatgaaagagggtgttaaagagggtttgaaatgataaatttagatttttgtaaggccgaaatgcaagctgacgcagacgaagaagaaccgaagttcgatagtcctcacagttcgcgctggatcgtagctgttgacgatgaaggttatgttacggtattatctcgaccattcattcatgatgcattctttgaatgtggacgcagcgcggaagatatcgggcttcctgattctgtcgaaatgcctcctggtgtatatgaatggatctgtggttttgaacaaactactgactgggaaaccggatatgtggacgggtgggaattctacccaaatgaatcaacattattgtatagctgggaaaatggcaaagttaacgaaagcggaaaccaagaaacacaatcagataatggatctggttcactctgacaaagcgctaacttacgaagagaagttattcattattgaaaactttcatgaaggcgcgtttacaaacaattctgaattaggggcgttctttacccctattggacttgctcgcgatttcacaatcgatgcttgcacaggtggaagtgttattgacctgtgtgctggtatcggtgggttatctttcgctatggttcattacatgatgtacaatacaccgcgtgaaatcgtctgtgttgagttaaatcacacatactatgagttaggtaagcgtatcgtaccagaagcctcctgggtgcatggagacgccttaacaactgaatttaatcaggtgtttgatatggcgatcagtaacccgccttttggtaaaatcaaaacctctgattttaagggtaagtatacaggggcagaatttgagtataaagtaatcgaacgtgcatcacagatcgcgcgtcagggaactttcataatccctcaaatgtctgcaaatttccggtattcgaaaacccattgtttccgacaagatgacagcacaacatcaagtaaatgtaaaaagtttcttgatgaaactggccttgttatgaatcctggatgcggtatagatactgggtattacctggaggattggaaaggagttaaaccactatgcgaggttgtttgtatggagtttgaacctgaaaccaaatctgatttattcactttcacaatagagtaataatcatgagtgatcaattagttaaaaatatggatttaacatatagcgtccggatgatccggctactcaaaaagccctggactgaatggactgcttacaagctggggatccttgatggacaaggcgaagtaattcgtaaccccaaaacaaaagaagagttagaagcgtattctccttttcatcgttcagtacgccatatcaagcgtagaatgaattctgttccgtatatgactgggtttatgaacttaacaagttcatatgataccctacgcaatcgctacaatctgacagaacaagagcatgaagaaatcatgatgaacgttccgcgcctcaaagaatattatgataaggggcgtatgttagaggatatggtcgctggtgattctggcggcgatatagaaaagattgcttctggtgtgactactggagcagtaaccaacatcgggccgaaagtattaggcgttacccgtgcagggaaaaggaaaaagaaatgataattcctccgctgaatatcactatctgggctactgctaacgattatacatggtttccaatttgtatcatgtatatgagtgacaacgcgaccgtttatcagaatcgtcgaaaaggttctgataaaattgatattgcaataaattattcgtttaaacaggcatttcgtggttggaagttaatgcttgacggaacagaaaagcaagtaagttcttgacagaaaaatcctcttagtctatgatattgaaatcatttgattaggaggatttacaatggcggttggatttggccctgctgacggtgttcaagataccattcaggcaacaatagacaatgcgatagattttgcacgttctcaaatcagaaacggagaatcattaacgcattgttttgattgtggggatccgatacccgaaaaacgtagggctatcgtgaagggttgccgttattgtattgaatgccaaaaagaacatgacgaaatgatcagcgcggggtataatcgacgaggatctaaagatagtcaactgaggtaagaaatgtatcttgatatagaatttgcaacccgaatcatgggatcactgcctcaaagcgaaatcgttcgtaaatcgggggcattaagcatcaatgcgcgttgtcctatttgcggcgactcaatgaaagacaagtacaaaaaacgattttggatctacccttctaaaaagggtgatcatatgaattgtggttgttttaactgtggttatggtgtaccgtttagcgtattcctgaaagaatattatccagacgattaccgtgattatctcatggaatcgtttaaggatcgcaattcgttaaagccaacgcatacagaacaaccgaaggaagagaagaaatttattcctactcttcaattctgcgaaaggttagataccttgccggatgaacatccgatcataaaatatgtgcagaatcgttgtatcccccgtgacaagtgggatcggttgtggtttactcgcgaatggcaacaactggttaatacggtgaatccggatacctatccgatcgcaaaaccagaaccgagattagtgatccctatcttcgataagaaagggaaaattgaatctttccagggtcgtgctttacgcgacggggcaaagtcgaaatatatcacaatcaaagcctgtgaggaatcaactaagatttacggacaggatacgatagatccgctaaaaacggtttatcttcttgaggggccattagatagcctgtttgttgataatgctggcgctatcactggtggacagcttgcactttctgaggttccgtataaaaatatgcgtgtctgggttcttgacaatgaagcacgtcatccggatactactcaccgcctctttaaattgattgaggctggagaaaaggttgtaatgtgggataaatgcccgtggccttccaaagatatcaacgaaatgataaaaacggacggcgcaactaaacttgaaattatgcagtatttgaaagagaatactgtttctggactcacggcaaaacttcgatttaagtcgtgggacaaatcaccgaaaaaatgagattgatatgactactgataaaactcctgtatttaattcatgtgcgcacctggttaacccggaagatctggaatttgtagattccgaatatcaaaaggttctggcccgtaatggtgatcctttacaatccatgctggatttacaaaaccatgcacagcaaagcctgtctgataccctgcattgggttccacgtccggataatctggaaacttgcggagaaatccttgattggctgaaactgcaagacgacgcgatcgccgacgaaacccgcgaattgtataccgctctgggtggaatgtctcgcggtgttaaacctgcttccggtgtttggaaaccgtggaaagcaaatcaccaggaattgcgcaatactaaatttgcggatctgagtgaagaggatcgtttagaagttctgtttgaacttatcgatcagtggcatttctttatgtgcaaattcctggcgctgggtatggatgcggaaaccatctacaaactgtatgcactgaaacaagccgaaaacctccgccgttgggctaacaactactaatggatccgatcatcgcgctagtagctgttggggttctttcttatggtgtttgcgcgatgatcacatatcttttcggttggtgtgtgtttcacgtaaatggcgttgaaagaaaacttttactgattatactatcagtgttttggtttgttggaatattctacgtttgttatgaggggcgagaatgattacaaaatattatatcgtcgttagtaaggataaagacgggtttaaaattcccttcattaaggaaggagagttaacacctttgttgtttctatctccggacgatgctaacgagtataaaaattcgattatcaaagaatatcatgataagatgaatccagttaaacaaagtggtcttagccgattctttcgaaaggaagaagttgaaaccgtaaccgaaaagaaaaagaaagatatgcgttggtttattgaacacgcaagtattcaaggggtattgattaaagtatgagcgaattaacttttgacgatctgagcgaagaccagaaaaatgcacatgatcgagtgattaaaaatatcagaaacaaaatccatactactatcacaggtgggccgggtgttggtaaaactactctggtaaaatttgtgtttgaaacattgaaaaaactgggtattagtgggatctggttgacagcaccgacgcaccaggctaaaaacgttctctctgaggcggtgggtatggatgcaacgaccattcactcagcactgaaaatcagccccgtaaccaacgaagagttacgagtatttgaacagcaaaaaggcaaaaaagccgctgatctgtctgaatgtcgtgtgtttgtggttgaagaagtatcgatggttgacaaagaactattccgtatcatcaagcgtactattccgagttgtgcggtgatcctgggattgggtgataaggatcagatccgtcctgttaataccgaagggatcaccgagctttcaccgttctttgatgaggaaatttttgatgtcattcgcatggataagattatgcgtcaggcagaaggaaacccaatcatccaggtatcacgcgctatacgcgacggtaagccgttaatgcccctcatgaatggtgaactgggggtaatgaagcacgaaaacgctggcgacttcctgagacgttattttagccgtgttaagactccggatgacctgaacaataaccgtatgtttgcttacactaacgcgaacgtagacaagttaaacgcagtgatccgcaaacacttgtacaaaactgatcagccgttcattgttggtgaagtggttgtgatgcaagaaccgttagtgacagaaggccgtgtgaatggggtttcgtttgttgaagttatctataacaacaacgagcaaattaaaatccttgaaatcataccgcgttctgatactatcaaagctgaccgatgcgatccggtgcaaatcgattatttcttgatgaaaacagaatcgatgttcgaggatacgaaagcggatattcaggttatcgcggatccggttatgcaggaacgtttaggcgattatttgaactacgtcgcgtttcagtataaaaagatgaaacaggaaaccggatacaaagccccctggtattcgttctggcaaatcaaaaacaagttccagacggttaaggcgcttccggtttgtacgtatcacaaaggtcagggaagcacgtatgatcattcatacatgtatacgcgcgatgcatacgcatacgccgattatgaattgtgtaagcagttgctttatgtaggaactacccgcgcacgattcactgttgattatgtctaagggcttcggccctttgaggttattatgaaaattattgttaaagtcaaagatgtagaaaagattttgcgagaagttgaccgtattggtagagaggggcttgattatctcgaagggttcaattctatcgatatcaatttgttgtttgcaaaattgcgctgcgttgtcaacgcaaacaaagaagttgggttatactgtcctaacgggccgacctacacgtggggaaacatttcacaagatatcgaattcacttttgaagagtatgcagtgatcattgatactttgaaaatgggtcgtaacattcgtgaaaacaaaaacatgcttgaggggttttaaatgaatattcaccttccgcgcctttatgctgaattggttgccgatctgattttgaaaagtgatcgttctacaatggaagattaccacgattgggaacatctggacaatttcgcagaggctgtagaaaacatgatccgactggaaaaatcgattgctcgttgtgggcttcgtcagttcggtatgatggcggtaactccaggcatgatcgaatccgttgatgttactccggaagtcgcgctatcattggcctatttcatggaatcgtataagcggggtcgcgaatgagtcatttacccgtagatttcgtatttgattatgaaagtattggcccgtttccaaaaggaaaactagctgaacttagctatgttccgtttgttgatgatccttatgatccgcctacctttcaggaactgattgctaaaggaagaaagtacaaatttgacatccggaaacaaccagaacgcatcaaagatgaaaaaacgatcgaatggtggaaacagcaatctaaagaagcgcaaagggttttgttcccttccgatattgacatggatttgtacgaaggtcatcgacaattctttgctgatttagcggctgacggtgtgagtcgttggcagtcatacgattatacgcgcggccctgaattcgatcgttctatgctaaccgatgttgtacgaactatgacagggaaacttgatacgtttgaagatatgccgaccgtgttctggaatagccgtgatgtgcgtacagctattgaaaaccgtttactgactcgcggagtgaccacgtgtccactacgtaaaggcatgttagatggattcattcagcatgattcgattcatgattgcgctaaagatgcattgatgctaatctatgctaaacgttatgctctggggctggaagaacctccatccttagaagagacagacgaaaacagcataggaaagaaacgatgatcacattaactattatggatcgccattactacgggaatacgattaacgaagcgaaagcaaaagcctttgatgatatcattaaccaggatctggttaagattgaatctgatcgctatgtcgtgcaaccaggcgatagcctatattctatagcaaagaaactgtatggtgttggtgaactttggcctgatatcgctaaaatcaaccgtgattctattccggatgcacgtctgatccatcctggtatagttcttcgattgccaaaactggtaaaaatttaaaacaaagcccttgacttcggttgagggcttttgttatattgggttctcagaaaggagattgatatgaattttactaaatttgaaatccggctgttgattacgctggctatttgcggagcggtatcattgattagtttgttaacgtatatcgctgtaagaacaacgatatggcttcatgactggtttactgtacttgacacaattaaggggtgatttatgcgtatagcgattattggggcggctttgggtgtaatcggcgaccgtttagtaaactgtatgatcgaagagttaaagtcatcaccctatccattttcgatggaatggaacaaccaatttcctaatttggttggggaagaacccacgatccataaagtcaaaccataccgaaatccggttgtgcctaaatcattgcaccgtcaatcagtaaacaggggtaaatgatgtcagaattcgcgttagctatccttgtcgtgattgctgtaatgggttcgatcctgttttgtcgcatgtatcagttagatgatacacaggaatggttggacattaacgaaaaacagtttcgtaagcactttgcaggtgaatttgtttttgtgaaatttcgtagtgactacaaggtcgagtttgagtttgacggaaaagggaacaactaccacataatcacttctgttattgatgcaaagaaaatctttgataagacacagggcggcgggatccgtaaattactcaaagaaataaaatagcattttttgttaaagaagcctcttgcattgcgggaggctttttggtatcttgtattcatcgaaacgaaacagagaaaggaatacgaaaatggttaaagtaaaatatgcagcacacgttaaagcaggtgagattgttggtttgactttcggcgctgaaattggttctcagtgggcgctggttgaaaaggttgaagacctgggcgataaagtagcaatcactgtgaaaatgcaaaaacgttttactaaccgtcctgtaatcactaagaaagtgaagaaggaaaaacgtgttaatactcagactttcgaagaattcatgaactggtgcaaaatgtataaactggatacctactaatagcactttttgttaaaacattctggggtagctttggtatagttaccccatcgaaacaagggaggaaattattatgatggttaacggttctctttatcaacaagcagttgcacaatggaaacagaaagttcaggatgcagaacgcgggatcgcttattgtgatgaagcgttggcaagcaatcttgaaaactgggaacgcaaagagtacgagaaagttaagcaacgccatttgaacgaactccctgcattaaaagaacacttaaaatatttgatggataacgaaaaaagccttgcatagaataaccatctttgatatagtacttacatcgaaacgaaacacactttaggagatataccatgaacactttcgaaatcctcgcagaaaaagcagcccctttcatggaagcaatgtacaaagcgcgtaacgctcgtttccaagattctcctttcgaaactgttttctttctggagaaaggccgcaaatatcatcgcgttgttcaggatactcgcaacaaagaaactggtgaaatgttcaatcagcgttctgttgccgccttcatcgataatgatggtaatatcctgaaacctgcaagctggaaagcaccagcaaaaggcattcgtggtaatatcttcaatgacgcagaccgcgcgattgaccaaagcggttatgtggtttatcttcgttaacaaaggggcttcggccctttttcttaaaaggaatatagcatgagtaacaaaaacgaagacgctaaaatctggaaagctgtaggggttatggctgtaatcgctgttgtgggttactatgcgtataattcctggcaagaaacgattgatgcgcaagtacaggaacaacaaaaagccgacgcaatcgaacagcataaccagcttatgcaattgcgctcgctgggatataccacgaaggaagattttaaaaattcctttggtgactataccggatccctttataccgcgtggggaatgactgacggcgattacatgtacattgaaacagatcgttataatgtcccacaaagtgtatgtttctatagtacgccgagagacaacggcaaaatcacgtcatacgcaccagaattcaaaacgatttctgttgatatgaagattgacgggggagaaaccctatcatttgccgctaaaggaaacaacggatccgagcggttgtgtcttctttctcctactcgtttcttacgcaacattcaagacgcgagtaatttaaaaattgctttaccatacatcaaccattatgatattgttgatgaagtaaaagaatggaacgtatcgcaaatcggggtgaaattcaaatgagaaaagcacgtaaaactaatgcagtgttgatgattaacggtgaagtaggaaaaccttgcaccaattctaaattcatgcacattgcagggcttccgggcatgacgcttaaaacgtcgtatgatacccattacaacgaagaaactacttcggtatacatgggagaagatctaatggctgaacgcatcatgcaatgcattcacttccctggtgaacgtccttcaattgattgttatatttttggctaccataaaggtattgtaaatgaatctgtataaagaaaatgatctctatgtttctgcatttggcctactcacgtatcacagtatgtcggctggatacgggaaagagttcgattttgtagcaagcgttaaacgacatttggaacgcagcggcgggttgtctattccgcgccaaatccattatgtttgtaaagaaggggtgtttttgaatggtgttcctcatgtgatccctttcaacgtgtttgaaaactattttacaaaatacgttgttcaacaaacggagacgacatccgagaatactgcaacgcgagaagaaacggcgatcgtacttgataagttttttgaaatcgctcataaagtgaagaaacgcacgaagagtgatgtggttcatcacctatcagcggaagttggcgagatcagcgaatgtctcattcagcctcaacgcggcggtaatatcgttgaagaaagtattgatgcgattgtgtgcgcacttgatgtgatttacctggaactgggtactactcacggacggtacgaaattgcaaaaattatcaacgaaatgcttgcagaaaaattagataagtggtatcgtacttgtaaaccttgagtttacttgtgaggattatatcatgttcgtatatcgtgtggaattttcttgttctttctggaatgattgtacagaaaaatggcaaacaaaaagcggcccatatgtcaatcgttatgtgtcaatggataccgctgaatggctggatcaattctgtatgaatcctgatatctatattgatatggatgataaccgacatccagcgccggatgacgataatcgattgatgcgcaaccttgaaaaagataacatagactttcaagcggatgggttatactttggttttcagtcaatacagcgcctttctcgttggttcaatgcatatgaacgcgagtacatgcacaatgttggtttcgtctgcatggtatacgaagttgaaaagttgtatccgggcgcacgtcaatgtgtttttgacatagacaaagcccgtttagttaagatgttaagtttaaaagagatttattaatgcctacctatacctataaatgcaccaagtgtaataaagaatttccaaaaatggcaagcattgctacccgtgatgcaccgaaagattgcgattgcggaggcgaagcaaaacgaacggttgataaacctcaaatggttcgtgatggtttcccttataacaagtaaaccccgaaaggggttttctttttcatagaaccctatataatgtcagtgattaaacaaagaggtgaatatgagtttagattttcttctggcagatgatgaaccagaacagaaaccacaaccagccaaaaaaggcgcaaaggttgacgaatcattttgtatgagcgatcgcgatcatattcggttgcgtccaaatatgtacgtcgggtcggttaacaaagaagcgcatgaacgtttcataatgggccaatatcgcaaggttgagtacgtggaagggttggttaaaatcatcaacgaaatccttgataactcgattgatgaagcgatccgaactgaattcaaacatgctaataagattgatgtaaccattgatcataatctggttaaaatctctgataacgggcgcggtattccccaggatgatgtaaaaaccccagatgggaaaatagttcctaaaccagttgcggcatggactatggcaaaatcgggttctaacttcgatgataaaaaccgcgtaacgatgggtatgaatggtgttggttctttcctgacaaactgttatagctcgatttttattggcgagactgcaaacgggaaacgcaaagtaaccattaactgtacggacggcgcacagaacatcgattaccgaaccagccccagtaaagaacagggtactactgttaagtttactccagacttctctatgtttggtgtaactggtatcgatgaagaaaccaaagaagtgattaaggatcgcttaatggcccttgccgttgctttcccgtctgtgaaattcacatataacggcgaaacgctctctaatcgcttcccgctgtacgcttccatgtatggggataaaaccattgtccagacaaataatcgcctcagcttcattctggcgagcactgaggacgggtttaaacagaaatcctttgttaacggtctggatacgaaaaacggcggtgttcatgttgagtgtatgatcgatggtatctattctgaacttgaacccatgatcaagaaaaagcatagtatcgagatcccgaaagcacgtgtaaaagaatgcttaactcttgtggtattcctgcataactttaatgcacctgcattcgatagccaaacaaaagagcgattagcaaatacagcaggtgagtttaacaatcatgcgaatttgaactacaaaaagatcgcaaaaatgattatggataccccagaaatcattactccgatcattgaatccgcattgattcgtaaacaagcagcagaagccgccgcgatcaccaaagcgaaaaagaaagcgaaaaaggcaaaaattgctaaacacgttccggcttccggtattgatacccctggggtagaaacaacattgtttctgacagaaggcgattccgctgttggtcagttcatcgaatgccgtaatgaagaaacacaaggcgctttcccgctacgtggtaagcctctgaatacatggggtatgagttttacagacattatcaaaaacaaagaactgtttgagctaatggctatcctcaatattcatcctggtgatacttccggaatgacttatgataatatcggtatcatggtcgatgctgacgttgacggcggcgacattttaaccctgttgcttgcattctttagtcgttggccttctttgttcacagagaaacggatccgatatattcgaaccccgatcgttatcgctaaagttgggcgcgaggaaaaatggttctattctcttgatgagtttgcaccgttccgcgataaagcaaaagatgtacgatatatcaaggggctgggttctttacgcaaagaagattacgatcgtgttctgggtgatcagttgaagtatgatgtcatcgtacttgacgacgaatacaaagaagtgttagaactatgcttcggcgacgaatctgatccgcgtaaagattgggttaatggaaaacacaaattttctaaggttgactaatggaaagaagtattaaagatgttgtacaggtggaagggctaacgtttgccctttacacgatttattcacgtgcgatcccgcacctggtagacgggtttaaacccgttcaccgtttctttattcactctgctatgcagggcggaacgggatttcagaaagtagcttctatcgctggcggtgttgctatgtatgggtatcaccacggggaaacctctgtagaagaagcgttatcccttatggcggcgcactggtgcaataacattccgttattcgaccgtgatgggttctttggttcccgtttggttaagaaacctggcgcacctcgttacatcaagtgcaaactatcgccaatattcaaagcaatttatatggatggtgatttaacgccagttcatgaagatccggaacatgtgccgccagcttactatctcccgatcattccgatggtactggttaacgggtttagcgggattgcaaaagcatatgcaacaaacattccgcctcatgatcctaaatcggttgttaacgggtgcattgcatatctgaatgataaagatttcacactggatctgaaatacccttactttaaaggtgaaatcacagacggtacaatttacggcacgtatgaattgcaaggtaaaaccaaattggtgatcaccgagatcccggtgaagtatgaccgtgtgaaatacattgcaatccttgacaagctggaagaaaaaggcgttattgttagctacaaggatctatcgaaagaagattttcgttatgaagtaacgctcaagcgagagtatgccaacgggttaacccgcgaaaagatcctaaaagatttcgggttgattgaaaattcaaacccaaacattaacgttatctttgagggcaaactatactcatacgaacgccctgaaacgcttctaaaggatttcgttgatattcgtatgaatgtatatcaacagcgtatcaataagcgtatccaggaaactaaggaagcgttagataaagcactggcaaaggttgcgtttattgctcaaatggtagaatctcctgattctctgcgtggccttagtcgcagcgaagcggttaaattcgtgtctacgtggataggttgcgagaatcatgccgaaatgttagtggctatgaacatctaccatctaaccacggacgaaagcaaaaagctggaagacgaagccgaagaattgcgtaaacagttgaaatactgggaagaaacaacccctaaaattgagtatctcaatgatttaaaagaactttctaagaagttgaaataataacaaagcctcttgcaatgcagggggctttttgctatattggttttgtaccaagcaaaggagattctaaaatgttgaaaactcgtagtgcaatggaagtaacccactgggcgcgtaccatgatggaaaaacacggtttgatcagtaatggttggacattccggatcaatggacgcattacaaaaactctgggccgttgcagttataccaaaaaactgatcgaactatctggtcgtcatgttgcggaagatatctacgaggatattttagacactcttttacacgaaatcgctcatgctcttgtcgggcgcggttatggacatggtaaagtgtggcaagctatggccttgcgcctgggtgctaaaccttcaccgagtaaaacaactacaaaggatgctaatctggttgataagaatgagatcctttactgtttgttcatgaaagattatcaaggccgtgaagtctatcaggctaaagctgataagaagttttacaacgatgtgatgaacggtgttaaggatatgaaaaacatttggatcagtgggcgcaaggcatatacaaaaggccgtctgtatatccgtccagtaacccatgaagaacttgcatatattcgcaaagaggggtaaggtatgacacgttgtaatgcgcctaagttgggaaaatatctgaccatattcggattttgtgcgttcttttctatcattatcggggctatcgtgtggggtatacttgatatgaagaaacagcaggtcgaggaagaaaaattggtaaaattccttgacacttattgcgaagtagtagaatatggcctgaacaaaaagccaacgaagtactcttgtgaccaagttatttttaatgttaagtgagaaataaacaatgaaattacgcgaagatacaccgcaaaccatctaccgagttggtacagataccagcaagggacgaaacaaactatctctacgcgcaaacaagaaagcgtataagatcctttcttcgacagtatacaaatacaagatccgcgcaatcattcgcgaactgtcttgtaatgcgatcgatggacacaaagaagcgggaaatcagaacccgtttgatgtccagttgccaactgctgttgatcctcgttttgttattcgtgactacgggatcggtatgtctcctgatttcgttagtgatgcgtttaccgtttacttcgaatcaaccaaaaatgattcaaacgacctgatcggttctatgggtctgggttgcaaatctccgctttgctatgccgatgcgttcacagttgaatctgtaaaagacggtataaaatgcggttacacaatctatatggatgatggggaaccgttctgcgatcctctgtatgagattgaaagtgatgaacctaacggggttactatcactgttccggttaaagttgaagatatcaaagaatgggaaaacgaagcagcaagggtatacgaatcatttactgatattcgtcctaactttgttggtgcttctattctcaaaatcaactatcagccgaaagaagcaaccaacgatagcggggtgatccgtcataaatcagcatacactagcggtgtatatgctcgcatgggtaacatcatttatcctctggataaagatttgtatgatacctcgatgttctattgctatacagaaagccagtatacgtatattattgacttcccaatcggtgaacttgatttcatgccttctcgcgaagagttgagtatggataaaatgacagtagggattgttaaagaacgtctgaaacaaatcagccgggtgtatttcaatcgagttaaatcagaattcgataagttacaaaccgttcgtgataaactgacgtggttccattctctgccttcaatggtacaaaactttgttggtaaagatgctaattttcgcatcaacggtgattctattggctggatccatagcgaactagtcaaaccaaacaaatataatgatgattatattgctgggtattgggcgaacgaatacgacggtaaagatgcatggtatcaggtaacgggtagcggaggccgctggagcaagtataagccagaaacaaccaaacgccaggacatcacacgcatttattatccgtggaaacagaagaaactcattctgttaaaagtggataccaacacggttaaaccgtatatcgtcgggtatgctaaaatgcataacctaagccgtgttagctttgttgcatattacgatagtgattcaaagcgtgagattgttaatgatatcgttcggaaaggtcattttgatgaatcggaaattgtgtatctccgtaccagtgaaatgacaaaagaaaaagagatctatgatgcagatcgcgaaaaatcaaaagcgctatatgcaccgaaaaattcagaaccgcgcccaaaaaccccgaccgtatatcgttatgagttggatagtaacggcaatctggcaaaaacttctctgtttatgacaaaatcagagtttttatcactggataaagccccaggtgttcggttatatggtattgatgaatatagccgcttagatggtgaaaattccaggttgtctatggattcagcaatgaaagaatctactttatcgcgtatcatgcgccatactgggatccctgttgtgtttgctatccgtaacagcctctggaagtggatcccggattcaaatctggtatgctttgatgatatgctgtgcaagcagtatgttaaatccgaaaaggcattgaaagataattgcttgcctggatggattggcaaggaacactcaacagaaacaaacgcattgtatagccgttttggtgtatcgcttgatcggattgtgaaaaaccgatataatgaaaaactgtataagattgttgataccctcgaacttatagtgtgtctggaagggtatgagaaagatggtaaaaatctttccagggcgcgttgtccgattctgcgtgaatctgtagcatcaatgcgcgttaaacgcagcaatatgaaaaaacgtgttgatcaggcatgggaaatctttaaatcactaaacccgttactggcttcacttgttgaacatagcgattcttattcaattcgtccgatttacaacaacgaaaagaatctcagtgagtttaagaaattaatacggtggaaataatggtcaaaattcttgacgaagtacaacagaaagctatctataatggatggttgacgggggcaagtaaaacagcactggcccaacagttcaacgtaagcgcccgaaccattgggcgcgttatcaaccgcaagttaacggaattccctaagaaaagggatgtaaaacaaaagcctaaagtatcagacactgtaccgcgtatgatcggatctgaatcgttcattacggttgtatacgaagggcgcgttttcatggcgggtgaaacacatccgaactttaagaaagcacatgaaatgctgaaagctggtgatgtcaaaggtgctgtaacttgtttggatactcaagaagcgatccgaacctatagcaaaggcaacattaaaatcattggtcatcagcttctatataaagatgtagtgtttgattctgatatcactcaacgaatcattcgcgaaatgtataacgatcgtccgtatgaacatctggtgaacttctttgaacggttgatgcgaaacccttcacgcgatgctgtataccagctttatgggttccttgtacataatgacattgaactgaccgatgatggttgttttcttgcctggaaacgtgtacgcgataactataaagatctcgctactggcaaatttgataatagtcctggtgtgactgtctccatgcctcgaaacatggtagacgaagataaaacgcgcacctgttctactggcctacacgttgcggctaaatcataccttccacactacgggggcggtgttggtagagtcattcaggtaaaggtggatcctgctgacgtggtagcgatcccagtggattacaataacgcaaaaatgcgtgtatgccgttataaagtcatgattgatgttacatatggttttagccattactaactaaacaaccgcgcctggagagttctgggcgcataggagactatcatgaaatttaaaaacatgccttcggctaacgaaactcgcgctagtggtgaatctattctgaaaactgcccgtgaaatgtgggccgacgaccgggtagaatccgggaaaggttacgtatttcgtaaaggatttggtgcattttatgttgcaaccacctttatagtagggtatagttgtttaggaatcgcgtggatgcaacgatatcttgaacgtgctgttctttttgtgatacgttttctgtttacattgatcagcgtagtgattagcatcccatttctgagcatcgccttgtttgttaacgtaaaaacaggcgaaattacaaaattaggcaaactggtatctaaaaaatatgaaaagaattctgacaagacttgacattcacaaatatgcaattaaaattggtgacatgaaacgcggaaccttcaagaaattcgaaggcgtggatctgaaagaaaacgggttttacctggtagttgatgataaaacagggcgcgtagtattccgtttctacgtagcaccaaatcaacgccgtaaaactggtgctagtcgtactctgttacgtatcaagcgccgcgaacacgaaccgtctgcgatggttgcgatgctggaaagtgcttctctgtactatgtagcacatgacaaaatcaaaaacctgttcggtttcccgaacctcaacggatcaacgttcgaaagtgctattcaaatgcgttatggtgctggtgaaaactacaccgagtggaaccgcgcactgaatgacatttatgattttgaatttcaaccatattgatgtatactgattaaaactaaccaattgagataaattatgaaactgtttaataaaattcgttctgtagatgaaatcgtagcaactttcgacaaaaccctgtctgaactggaagcgcgtattgctcacgataatgagcaggttgcacaggttgcagcagatcgtcaagcagcagaagaagaacatcagcgtaagctggcggaactggcttcaaaagaaagcgatcatactgcaagtgcaacccgcgccggacgtatcgcagacaagatccgcaaactgctggattgatacaggggcgaaagcccctaaatatttttctttaaggggcttatatgaataatttggtagcgaaacatgatttcaaccgcgcttctactcaccgcgatcgcaagcgagcatttaaagaagcaaaacgtaaacagaaacacaaaggtaagtgtgatgaaaaccgctttgatcattcttgaagaaattcctgaaaatacaacgctttacaacgtcgaaaccgacgatagcgaagtaattgagatcctcaaaaccgcccacgggcattatgtaaacggttccggcaacaccaaagaacaggattatgctgttgatgttgttaacctcatgctggggccgaataccgatgataacctgaaatgggcgcgtgaatccaacattcctgaaaagtatgttggtatgttctatcagtgtaacatcgatagcaaatcaccgtttgaacctgaaaagaaaatcgatctgattgttcgcactgggttcttcttatgagtatacaaattctgttcagtaaagaagatccattaggtacggaatcatcggttcagcgcttattctggcatacagattatataaaaaatcgatgtcgtggcccaaacaacacatggggaagcaacaacgatattgacaaagcaaaaatttatcctcgcggaaaggcgtactggaaaatttttgatattcatcttcataaaacaatgaaagattcgaatgaatgatgaaaaagcccttgacttcggtcaagggcttttgctatattagccatatcgaaacgagataccctttaaggagaaataccatgactaacgcaaccgtagttactaccacttacttcatttcttctggtcgtaaaaatgcaatgtacaccttgcgtgttgagcgtagaggtggcggttatacttctgataactatatctgcaacttatctaccgatccggagaaagcggaagcgaaagcgcgtgagtatttcgaccgtgtttcaacccgtttaactgaaactgatactttcaaaatggtattccagggctttgcagatttcgatctgttcgaacgtcgcggtaaactgtcagtgttcgatactgaaaaactggaactgctggaaaaagggatcatgccgattggcaagcgtaaaggcgaagtaattgcagaaatgccaatgtttactgttctttggtgggctgaccagtctaaagaagacaacaaaaacagccctgtttttgacgccgtgtgtgcttactgcatgggtgttgcactggagaaggattatatcgccaaacgcgaagaaatccgcgaacagtgggaacaagagcgccaggaacgcatttctaaagctaaccacatcggtgaaatcaaacaacgtctggaaatgaccggaaccgttgagaaagtgatttcactgggatatactcaagtttcttactacacttctgtagaaagatttatgaccaaaattaatgttgatggtaatgttgttgtttacttcggtaataacattgcaaacgaaggtgatgaaatcactttcaaagcaaccgttaaagagcacggagaatacaaagacgttaaacaaaccatcgttcaacgtgtaaaggttttataatgacatacgaagatatgcttaatgaagtgtgcgcgggtaaaaccgcgtaccgcactaccaaccctgatatgattgtgtttcgtgaaggggatacaatcatcagacgtacacaccgcaagtgtgaagtaaaccaggtattcattgccacggtagaagaacaaaaggctactgattgggatatcgtcattgacgaagaaaaccacgatgagctagatcatccgatattcattttgagtgaaactatcggaattcgaccattcatgcatagaaatttttgggggtatcaatgacgttcgatgaggctatgagagccgctaagagaggttgtaaagttgcgccaataggtaggccattcttcgtgtattatcacgacagcgctggatacaggcgggttacgttaggggtttcggcaaggaatgaagattatgttccggatccgtgggacaaattgaaagtttgggatatttacgagaaaaatagcccggtgatgaacttctttaaagcaatcaaacgggctattggaagaacacacaatttaacaccagcattacgttaatcacctcactcgacctaaaatacgcgcggcctgtccacatatgatgtttagcttcatatctggtatattaggccgctttgcgtaccattccatcaaaaccgatccagaatagtagttatcaagattaaaataagggcaactaaaagtataagctactggcacaaaatcacgtgtcggtaggtaggaacttgctttagtggatgaataatacaagccatttatatgattcgtgtactcttcggatgttttatcgatcggataaccgccgaggtttttaggatcgatctgggatggtaattttccctgatattctacaatgtcaacaaaatagtttatattctttggtctgaatgccaataccgctgaaaaatccgcgttggaagtaagatgaactatgctcaactgttccaacgcggattgattaaacttttcagttctttccatttcgatagcccttgtatcgactacaagggcaccttttatcatcgggaatatatcagtccatttgtaccaagttactaccataagaaacataaccattattagaattatttttatcagcaattgtttccatgttttcacacccatcacaaacgagattacccggtcaaataaggctagtttatctacgggatttctctcagccatttttataagactcttcttaggttactatacgtatatttaggatacaacaaaaggctacctgtatggtagcctttaaaattacatagattctaattctttttgtagcttgattagatccgccagtatgtcttctttggttctttctttttcaacttcaacatctttagtcattatggtcttgccatcgataaattcgaacttcctttttgagaattcatcccacgaatcaacaggaaaatcgtcgagctgatatacatccaaaatcatttctttatcagcaaacaaacctatcatagtaggatcttcaccgttgtagtaattaattatcttatttgttttagcatcaacgataataatatgggaatttttatcaagagagtttctaaaagaataccaacacttatcattacaatctcgatagtaagcaccaccttcaaaattgtgatgccatttaatacctttcatttgtttaacaatcattattttacctttaagtttaaaggggtcgaagccccttattatcaagtagcagaatcaacccattgaacgcccggtttccatacttgtaaccgtccgccgataagttgcatgttctggttagcttcgttgctgttaccgttaagaccaacaagtacccaaccagcaggaacagttttaccaggtgccggtcgaccaattgggccaaagtcttgttgagcaccagtacgaacccattgagcacattggttaaacctatcgttgatatagttagtgatataaccaccataaacatcaccctgtatgttgccatcaggatgaattctccagcgtgcgcctggccctaccatttggcctgcagagccatgtaattgccattcacttccaccggctcttaaacccatcatggtattattgtcacgcggcatataaatcacaccacgctcaccaccgttagaatgtcggaaccaaaggtgtgttgtaccattatccgcagcaggagccttaacatctacagcaccaacaaagctaccaataccgtaattactaacaacattaccgtcaacagttaaagcaccattaacagcagcgtctccagtagcccacaaagaagtagtttttaactggtttccagtgatatctacttttcctgatacagtcaagtagccgttaacagcaccaccagtacaagttaatgtaccattggcattaatattaccgttaaccgtgatactaccgtttgaatcaatacgggtttcgtttgtgctggatgcatcaccttgcggtcgcagataaattgcttgacctgctttagcagaaataatcaaatcaccgccgttattagcacgaattttagcgccttgttcatactcgatcgcagtatcaccaccacttccagcggtagcagttactttgatcctgttgttggtttgagttgggccaccaggacgtaattcaacagcattaccaccaccagaactaccaataatcacgcgaccatcagtactttctaacagagcactacctttgccaatcacaacacctttatcagtgtacttcgtggaagaagcaccacctaaccctaagttgccacctacgcgagcgttgttagcaacaatcagatcatttccgctgttcaggtttcctgtagtcgtggtaacagatttaaatgatacatcatcatcgtttccgctaacgacgttcattctccacggtgtccaggttttagtagtaccgctaacagttaaccaacgttcccaactgcgtttactatcagatgtacgtaatacttgacggttagtgtaatcggtatcgtttattttacggagacattcaacaataacagtaaagttaccaccgacgccagaaggtttattggtgatgttattaccgccacccatactagggtatgaataaactttaacatggcctggggtagcgccagttagcgttaaatcattaagatctagtttaacatcagccaaatcatacgctgcgacagggccagcaaatccaccagtcgaattaaccacaccagcaacgttaatatcacgaccaaagttaacaatccatctgtttactgtatccgaagtcaacagccatgcgttgtttgcctggttttctgcttcaccgtaatgaatatcaccgtttacatcaatacccaaacgtttcatgttcattccggaaagtttaaacccgatagacaagttcgcgttagtcggtctatccagtaacagcggagtgtgctgcgaaccactaatagaaacggtttgttcggttgtggttgaacttgtgttattaaagttcgcatactgagtattgacacttttaccgttgaaagcgccgctagtgatatttacatcaccaggtgatgtaaacgtaccgtcagatttaaacgagaattctccacctgtcgttccacccgacgttctggcacgaatgcgaacttcaccagaagaggcagtattaggcaacgcccatacagcaccagtttcaacccctttatacttaaaccaaattacggagtttccgctctcagcatttaaatggaatccgggagacactttggtaatagacagatcacctgtcataccatcaccagtacgagcaacagcccctacgtcatccggagttggtttaaatgcagtaccgtacagttcctgagagctgatttttccggtatctgagtttaagttagcatcattagttgcaccaactttaacgcgaccagtagcccagtcaaccgagatcaccgcatgaacatctgatacagagctataaaaacttgcacccataccatagttaatttcagtaccaagcgtatttcgcatgaactgagaaccatcagcacgcagttgtttcaggtaatcgcgagaggttgaactactataggatttacccttaccgcctaaaccgtaagcaccaacaagcattacttgtccggaacctgtaccaacatcacgggttgcagccgtacccaaacctaagtttgtgcgagcagcatctactgtacttgcacctgtaccacctttagcaatagacagaataccatcagtaccatcgtcgagattaggcttgtttacctcatcatagatacgaatagccgtactctcaactaaaccttccggttcggttgaagaagtcgtgtaaccagtaggcagataatatttagtattaccagcaatagacagcagagcaactttaacactactaatgaatgcgcgttgcataaaccacagttctaaaccctcagaggtacgaaccagactataacgcatttggttagtgttatcaattccaggatcaccgattcgacgaatttgcagataagaacgaatgttactgcttgttaatgttgcgggaaagtttctagcgctacaatcgataaagtcgatagagccacgcgtagaaccaaagttaccgccgttcgtcaccatcagttgcaagcgactcggccctgtgccggggtctactaaaagagcaactttagtccaccgagcttcgttgcctgtagctatagggaaattatcctgtttaagttggcgctcgttttctacattagtcagaagagtaccatctttaccagggccttttccactcatggcataataaacctggtaatttctgaacgacagattaccatcattagttaattgaagaacacccgagcctctcaagtttttaatatagacatcgttagctcctacacccatttctaacgtaagagtgcttccattactaattttaacggttttattagtggataatcttaaatcgccaggaagattcgtattacccgaaccatcaagcaagactaactttctggcttcaacgttgcctgcgccgcgctgtacgatctggatggtttcaacgccgtcatcaatagtaccgatttcaagaataccattgttgcttgtaccaccggaaccgatgtaccaaccatcattagtggcgcatttgccaacgatatgacgagttattccaccacttaaatcctcgttggtgaaagtaatagttttaccttccgctacggtaacggtatcattaagagcactaggcccatcaactgttaattttttggtatttgtttctgggatacctttacccgctaactgaacgatcgaagaaccatttttcgtgtaaatggcataatcagccatgttgatcgccagttcaccatctgcaagctgacttgtagtaggtgttttccccgcaactgtgctacgtaggaattgaattttttctaaatcagccatgtttcaccttaataagatccaaaatctatgatagtccctttagtaattacctggtcgagccgtggtacgtgttcgggacgggaagccgcgcctgtgctcgagaattgcggggcagttaatagccctgtcattgtatcgccagcgcgtaataccctgctattagcatttgttgtgacattatttatctgtccatcaacataactttttcgtgttgcatgacttgcgtcagtagggttagcggttgtaatactgatttgcttttcaaccgtaatattacccctagtgtttaaatcaccatttcgagcgtcgatgactaatacgcgaccattagcaccgtaagatgaacgaataccaataccataccatgatacaagatccatgttggcttttgataatgccgcgccatcaccatcaccagaatataaaccgttctggtcacttccgcctgtgaaagtagcgttaatttgtagcccctgtttaaaggcaactacacccaaatattgaccaccgcttgctttagaaacgaagtcgttatttgatgcttgcggtttatcgttttcagtataaaccttatatccgcgataggttagagtattaccaaccggaaccagcggaaatgtgccggagtgccaaataggtaaacccccgactgtagaaccagcttttaaatctgccataataacccctttttacatatttataaggcccgatgatccgggcctttgtttatgcatcaacttcacggaattcggaagcagaataatcaccaccaggataaaccttagtattcggcaattcaaatatatacggtgttccaccatcgatcatgttgttcattctgataccgttaaccccaaactgtgcagcaaagttttgatcagcttcggcagcagatacctgaaccatcacgaagttacggatcgcagataaactatccgtagcgggtttaggataacgagatacagcaacgttaaatccatcacaaccactagggatcgtatagaactgttcaaatcgtaaccactcatcaggtttatttgcaggaacttcaatcaccgatgatgaagtttgagcagtacccgtaaaccatcgaacagtaacccttgttgttgatccagcatccaataatgctttacttgcgtaaaaatcaccagtaatcatcatagccaatccaggagccataccgtaatcagctagtttagagatcactgggtttgcaacaggatatactttatattcagatccattggttgaattgtattcttccgtatcttcaacagatctgaaaggtacaccagttcgaccaacatcaccaacgttatcatagacaaggtcgattgatgcgcgtgaatcttcttttaaaattccatcgttagcgtaaaacgattcaatcagtatacgagattttgcggccccatacaatgcaacatatgcagaatttgggaatctctgagcgaaatcagcgccttgccacataacggatctgtttttagcaaaccaatcatcaacgatttggcttgttttgtattcaccgttagtcattatcaaatacagcccagaaggttgagcatccatatattcaacaaacgctttgtttgcagttgctgaattatcattcgataatgtgaaggttttaattggatcaactacagcattgttaattctccatacgttgatcccaacactaggcggtgtccctaccgccttttgatttagtgtaaactcatactgattaggaaccgcattgggatgtgttgcctttgcggttattctgtaagttacgctgtttgtttccgatagaatttgcgtttctacaaaatcggggccgaaccccgccattaagtttgacattatgccacccactcaaatttaactgtctgagtaaccggatctgggtaaatcttaacgttaccaactttgatccaatcggtaacagtcatgtttttaaccgtagtaccaacagcagacgttgcaccaatctcaccagcagtaggcgggttgttgctagtatacatgcggccccaaccatcaaatttacccgtgattgggttcatttgacggatccagaaggattgcgccagcgcattaacaccagtaccagaggtcggacgaggtgcccaaatctgataagtgaatgcggttccgttaccaaactgcgttaaagtaccaggtgctttaacataggtataacgggttacaatcatgatatccggattaatcgggtctggttcaagaaccggaaccgcgtaaccaggaagtaagttgtactgttccgatgctgtgatttcagccgtccagttacccctagatgcttctgttactgcatccagtgttgaccaagccgcttgacctgcgatgataattgaactgttgtttactgtcaaccgtccagacatcgtatcacctgctttgcgtacatacgtagggttaagcaaggtttgcgcgttcttctcagtaaagactttataagagttcgcagattcttccgctacgatgttgccagcatcagaggtcaggatcttagttgtcttgttgttcgtacccatagatagaacagaaccagcagcagtgatcacggtatcattacccagagtcactttgctaatcgcctgaatttcaggagcctggaatttaacgttagctacaacgccgcgagtatcattatacacagaaagatgaactgtgctagtgttacccgttgagatcattgcaatacgcccagaggctgaacttgcttgaattgaccagtcgttagatgaaccaccattcaaacgaagtttacccattgacgaaccatcaccaacgttcagatctccactaatattcattacccggaaacttgcgtcagcggttgaattaatgtcagcctgtacagtggttgctttcgttagagtcaatgccccgttaaccgtctgatcaacatcacgacgaatgaactgggaagaatccaggttatccagcttatcagcatcaaccgctttagccccgatcggcagataatgtttcagcgtcaggttcaattcataaggagaaacagcaacacctacagcggcataaccatcatccggaagagtagaaccagccacatcattaccagaccaagtaccaagccccttagacagtttcacagtaccgcgtaccagatcggtagcttgccatgaagtatcaacctgaattgtatttttcaagttcttaggagaaacagccttgtttgtaacggtgccagcggtagtttcagcagccgtagccacctgaatgataccttctgcgctctcggtcgctttcttagcgtgtaacttcttaggggtaacaaatactgtatctaatgtccctgcgttcgtctcagactgcgtagcaacgcgtaaagtaccacgttgagtttcagttgctgattgaataccgatgttaaccgtagtccaaatagtcccagattgagttaacccgtcagcagtagcaacagtaatatggcttgtatcgtccagataacctttcagtttagacggtacgatcgctttattagttacagtacccgctgatacttcggcagtggttgcaattgcaatgatacctgtcagcgtttccgttgcagcacgatcgttaagcgttttaggtgttaccgctcgcgtgtaatcagtaccagcgtttgtttctgtctgagttgcaatctcgatcaaaccaatacgaccatcagtagaggttttcttgtgcagcatttccggagtaactacggtcgggatgtttgcacttgcaacagtaccattaataacttcggtttcagaagccagccatacagcgccagattgtaactgagtcgctttatactcacgaagagttttaggcgttaccgctttctgataatctgaatgatcataaaccccagtaccagcctgagcacgatccgtgttggtgttaggagcaccacctgtagcaacaagggcaagtataccagttaaggtcggcgatgcaatacggttatgcaactttttcggggttacaatcgtaatatcatcggtgcttccgtttgtttctgcctgagttgcgatttctgccaatccacgacgggtttcagtcgctgttctttcgttcagcttcttaggggtaacaatcacatcatccagataggtatcggttgaaagtttgttaacctcagcagttgttgctaaccgtgcaataccacgacgggtttctgtagcagttttatttgctaacgtcatcggagtaatagcagtttcgtcgttcgggttgtcttccaagtttttgtttacttctgcctgtgcagccagagcaataacaccagtacgcgatctgttagttgcgtcaacacgttcaacgatcggacgataattagcaacaacccattctttcgtagctttcatgtaagaaaactcgatatacgggaggtaatcactagcagcattaaatgctaatgaagttacactaaaccaatcatcaggcggatagtctttgcgctgcgggaactgcatcatatttttgttggtgcggatcttgtccgttgtaccatctttaactttgattgtgcagttctggtttttacccatcatataaagggatacgtaaacgcgatcaccatcagcaacatcagttggaagggtaactgtaacgtttggtatagtcccagaagggtttgcagtaacaaaaacgtaatcgttaggaactgcgtttaaatcactatagatacgacgcagacgaacacgattatcagcatcatatactttccattggctattctgtgcatcaaagatgaacataccaaagccagatttctggctagttaccgaagtaacaccagtaattgcaccgtcagaaatagtgtgtccactacctggataaatctgcaaaacggctacgttgatagagttcattttatcagcgtcataggttgtgatcacatcaccatcatttgcatatttcggcaactggagagtgattttacctgtagcactgttacggaaaactgtcatgccagattgtaactggaatgaacctgttccggttgcgttcacgatctcagaatcgcggttatccagagtttcagcaacacgccatacgttaccgttatagataaacgttgcgatcatgtacgggtgggtcagtcgatactgtgccgattgtacagtacgtaaacggatctgacgggtgttagacttaacaaggatactgttcacacctactaaaccaccacaatctttaaacgtgattacgtcgccctctgtcgggttgtccggcagcaggtacagaagttcagtaaagcgtccatcagccataatgtaactaccagattcaataatgctaccatctggagtggttacgttactataaacccatttcgggtcattacgagttgcgatccatttggattcgtcgaaagccccagcaggggaagcaatattctgttttgcgtaccagatacgacgcgcataaatgatcgccatgtcttgagaatagccacgggtcgggtcatactgctggattccgttaaattcattgaaaaagtcaacgttaacgccgtcactcagcgtattacgatcagccttcccaacgttgataactttttcaccagcagcatcaaggccacttcgtgcgcggaatgatttagctaccattatcttttttcctatattgtattcaataccaatatttatatacaaaaaatggcccgaaggccatttaactgattatttattacttccgaaccatctttttatatttcttgattgtttcgtctgtaatctggtttcgcttatatagaggggttacaccgaacgcctcaacaccacgttcattaaggatcgttgctacgatttcctgtctgataaaccagcgcttaactttttccggaaactgttcattgatacttttaaacagtttggcttcccaactatccagcgtttcagggtggataatatgatcgaatccttccagaaaatcaatcgttgttgcgtgaatagcgtttgctactttgcgaatgtattctttattcatgcttcacccaaatactctttcaattgcatataaccgccaataaaattaccatctacaaagatccgagggtaagtaaatgccatgcttcgactacgaacacgtttcgctaactcttcaatgcggggccgatcgtaatcaaaccccacactgttatttgctggctttagaacagaataaaattcgtattctaatccatgctcatcaagtaatttccgagcttcaatacaaccataacatttatgaagcgattcgggaataccgtaaatctcgattttcatcaattgctttccttcgtgccggagtgattttgctaatgatatctttctttgtatcagaaagcatacgctcaatcaattcaaccgcttcaagttgttgatgcagagaaagaaggttgatgatttcctttttctgttcatcaatagcagcttccttgtcaatcgcgtacagcttattatcaccgaaaacatgctgtaatgcaaattcaagtgcctgtgaatcagtcggcgctggtagtacagaaatcgaagtgatccgcttgacaaaaggataatcaaatcgcagatcattgatatcttgttgaacaggttttacagtcatccacattttaggatcggaagatacgaaatttaaatcaggcgcggcgatttcttctttagtagcaatcttcggttcttcttccggtaaatcatatggtttgaagtatttccagatatggctagggatctcatattcgaaatcatcttgcagaacataagcaatgtcctcagtatccccaatcgcaatacgatcgattgtaatatagccgttgtttttgatcaattcagctaaagcatttcgccaggttttttctgcaaattctttagcgtcgatgttcagggtataagatttaccttctaataattccatgtgtcacctcataaaaaagggtgccggagcacccagtttaatttacttgcttacttctgctacttttcgagcagctttgcgaaccaggtcggaagcagtacgcagattttgaagcgcgtcatcatgggctttaaccgcttcttcaagctgtgccattgcttttgcgatttcttctttcttagccgcttcgtctacattgatagcgatagcgctattaccggaaacgctaacaggttcatcaacaattcctgtcgccagttcacggaagaacgaacgttcagaatcaagcagatagtaaccaacttttccggtctgggaatcaatggtttctaccgttttgctcaattgatgatgaccgagcgaagtcgtatggtaaacggtgtatacaccattactgtgttcatcggtatatgatttgatcccgtggttagcgccacaacgatttttaaattgctgcggtttaaccagaacatacgaacggccttcaacaaatttagtcggatccagttcaaccgacattgccgaaccgccatcaagcatttgatcaagatctgcggttgctggtgcaacaggcgcaaccggagccgtaacgttggcttttttcggtttggctttctttttcttagctgtagccgcgccaacttcgacgaaataacgagcttcccacgaacgcagagagatataagtcatttccggaggatgttcaattttgaaagtatctgaatgggttttcgagataatttttacctcgttattcaggaatttttcgatctgcttcgcctggatagtgtttgctatgttagatccgccatgtgaattggtagtaaacccttcacggtcaaccagtttgtaagttttaccaaccacgaacgttttcagttcatttgcttgaactgtccacgggcaagaaccgcgccctgtattacggatggttttcaggggaatgttccacttccagcaatagttacgtgcttctttacgggttttgaaattcaggatcatgatattatctctcaattaaagttaatcgtcatttacgatgtggtaagattaccatagttacacattaggtcaagcaatatttttaatttctatcgaatttttagcgaattcgatcatacgttgattatctgaaccgcgaaacggttttttagttggtaaatctttttcatacttaccatcaatcagaacatcaatgtaaggaagtagcttagaacgttctgggtcggcctgtaaagcctccagggtatatcctgtccataaccatacgtttttctttggaagttccttagaaacgcgctcaagcagttttaggatagtaggatagttgtcacggtaaagcggatcgccgccagttaatgtaagtccatcaacatgcggattactcaacagagaaatcagatgattttctgtctcttccgtgtacggtgttccgttgcaagggttccatgaactgcgattatagcacccatcacacttatgattgcatccagccacaaacaaaacaacacggatcccttttccgttgaccacatccatgttataaattctaatataattcattcaaatctccatgtatagcctttataactttttatttcgccgcgacaggatcagttctttgatccgttcaacaataacgatgtattcccatttagctaacttttgggtatcacaccacttttgaaactctttcatagcctctaagtgacctttactccagtacatttctgcaatttcgttacaaagagtttcagtagcagtgtttttgattttcataacatcctccttagttgacaagaaggatgttactacattcagatatacaggtcaatacttttatggataatattgaatgaaaaatgaaggaagtccttcgtagttcacatcaacagcaccaattttaacgattgcatcgcggcgggtagcctcttcgacaatctgatcggttaggcttacaatctcaccggatacccaatgcaatttgtgttccggatcggtagccccacagaaaaacagttcaatttcgttagcttccagttcacagcgtagatagttcaaattacgtgaatttgttttgttgaaaatcataatattgcctcaaagttaaattatcgtatatcatcccgaatcgaatcaagaacaatgtaatctatcccattcactcgtttaccactgggtttacgatagcgaatgttacggcctttcatatcagtggcttttgaaatgtagaatgacttcgtttcgcgtagccattcactccattcctgatatgaattaccgacatttcgacgcactttagcgtataacggaaacatcacaaagcctttagtttcgcaagggtggatttatggatttcagcctgtttttctgaatttttcagattgcgttcagcttcccggatcaggtaattccggcgagagcgcaacaagttgagaacatctttcgctttacgggcgcgtttaccgaacagatgacaagtaccgagattgtcaagcatgttcaggagatcatagatttcctttgcttcatcctcttttggtaataacggtttctctttaacaacaacgtgttttttgaataattcacgatcgctattagtaaaaatgtaagattctgattcaaactttgtaccaaagtaatcagtaaaccctttaacaccgaatacgtcatactcagtaactttaataggaaatactaccttagacaaatcattagccgaaaacgaaccgccacgaatagccaagtttcggtatgcagtcccaaagcacgtatcatcacgaaaaacaaatttatcttttgtccaatacatcataaatccctcaattttgcgccgctaataagaacatctttcatttgttttgcggtgcggatagtagttgtcagttctaaagagacatcattacgatatgctgtgccgtcttcacacagaaccaaaccaggacggcccttgatagggttgatgacttcaacgcgagttggatgattttcaactttgtagcctaatgcaaacgcacatgctactacatcggtcattttcttagtcagtttcataatctgtctcctttttcgataggcccaatataacaaaagccctcaaccgaagtcaagggctttttgattaattttgatgcttaatgcgatgcatcatttctttgttcttaccttcgttgaacccacggacagcaggagcacccaaatagccgcatgtacggcgcgtgacgctcattttttccggatcatggttcccacaatgggtacaatgaaaaccgtcttctgttggcttaaattcatcatcagagccacattcaaagcatttatcaaccggaaggttagttccgaagtagtccagtttatccattgcataatcccagactttttcaagggcttccaggttgtttttcatatcagggaattctacatagctgatatgtccagcagttgcaatgtaatgataatcggcttcatagtcgattttctcgaacggtgttaccttgcggtcaacgtccagatgaaaactgttagtgtaccagcctttatctgtgatccctttgatacttccgaatttctcatagtccagtttgcagaaacgatgacatagagattcagcaggggttgagtacagactaaacccaaatccggttttctttttccatgcttcggtcgcagcgcgtagatattccagaatcagtctacccatgttctgagaaccgatccggtcgaatgggtgttgtccagatccgaaaagcatcagagtttcatgcaatccgatgtatcccagactgatagaactacgcccatttttgaacagttccagaatttcatcatcgggtttcaaccgtacaccaaacgcaccttctgtataaaggatcggggctacactggctttaacacctctgagactatcaatacgagtcatcagggcttcaaaacacagttccagacgttcatcaaggatacgccaaaatgcatcatgcgcgtcttcatcttcctgtgcttcggcttcaatcgcaatacgaggaaggttgatcgtcacaacgcccaggttattacgtccatcaagaatttcattaccgtgctcatcattccacacgctaaggaaactacgacaacccataggagatacaggaacgctagaaccagtaatacgacggttattagccgcgctaataatatccggatacatacgctttgaagaacattccagggccaatttcttaatatcatagtttctgtcttccggattaaggttaattcctttttccataaacataaccagttttggaaatacaggagtgataccctctttacccagtccacgaatacggtttttcagaatcgctttctggatcatgcgttcgcgccaaccagtacccataccgaaagtgattgtgacaaaaggtgtttgtccgttggcagtatgcagcgtgttaacttcgtattcatacgattggaaagcatcaaacacatccttttcagtcttttccattgcatatgtacggtctaacgaaattttatacttcttagcatccttaacatgcttttcatatgtcatttctacataaggcgctaacaccttatcgacgttagcaaaggttgtcccgccgtactggtgagaagcaatctgtgcggtgatctgagccataagagcagtagcaacaccgattgatttgggcggttcgatatccgcgttacccattttgaaaccattctcaagcatacctttcaggtcaaccagacagcagttagtgtaaggggtgaacgggctgtaatccagatcgtgataatggatgtcaccggaatcatgcgcttctacgatgtgtttcggaaggatatgattacgggcgaaatgcttcgccacaatacccgccagcaaatcgcgctgtgtcgggaatacccttgcgtctttgttcgcgttttcgttggtgatctctttgttggacagattcaccatgccggagatatctttgaacagtttacttttctgctcacgggcaatatcgcgatcgtggcgatattcgatgtatgcacgggcgaccgctgggttcgttttcatcagggattcttcaacgagttcctggatacgggcgatcttcattgcgctaccatcgcggatctgattgtactgaaccagcatgattgcggcatcagcatccgtcatcgtaccgccagctttatacacagcattgcgaattttttcttgatcgaaatcgacggttttgccgtcgcgtttttctactttcatttcgttgccttatggataatatctaaattgtgtccaatctcgttaagatatttgatcagttcaaccccgtcaacaggtatatcccgtcctacaatctcaaggagttcccacatatcaataacggtgataggagaaaaattagtcaatgtgcgaccgcgatcatcaaacatcgttcggtctttcggtttgacataacacaaatcagagtcaccccttccaagcatccaatcatgtagagatatgatctttttgtcagtggaggatatcaacatcatcagctttttcttctgttgcgttgataatcgagcgtttagatatttcatttcgttgccttcattaattgctttctatattttgcggttaaggctttgcgttcgtctttgtcggcgtactcgaagcccatagaaaccatttcggcaatcatatcaggtttggtaagtcttgaaaaccattttaccttatctggtatgaatttgtcatgaatacggttttcggaataatcttgtttcagatatgcaagcaggctttctagccattcgatgtaatcaacatcacgggaaaccagaccagaacgattaaatttgtgctttacaataccttctgtaccgttgcataggttacataggaggccgcgcacacgtccggcattagagccagatagagcatgatcatggtcaaggtgatgtttttcaaggtcaccctctaaagggcgaccacataacgcgcacaagccgttttgctgttcaaaaagagcttgtttaatggatggataatctttcttagtaatacgtttagtgagcataataacaccaatcaaataaaggtgttaatatttatcccaacgtgcgaacgtactcacgcagttggtcaaagccgccgatgtgcttaccatcgtggaaaatttggggcatggtcagtctacgagtacctaacaggctttcgagttcagaaatgaccgtttcattcaggatcggtttgccgtctgcgtctttttcatcggctacagaaacaaactcatattcttttcgttttgcgtccaggagacgtttagaattcaggcatggagcgcaattataaacagaagggatataaccaaaaatcttaaacatatgttaccttacattaagtcatccagtgtttcagggtatgtatttacgtcgcgtttctggtagttacacacgtagacttcttgcgttttattttgttcgtaagaatcagtatgctggcctaacagatactttttatcgaggttatgcacattatatttttgcatccactcgatcaggatatcattttgctttcctgcatgatgtgtcacgtttgataaaccaaacttgataccccgctcatgcagggagtcaaggaaagcatataactcgcgttcgtgatctgcgttccagaatttgttatacaccgcatcagtgatcagatacggaggatcgcaataaacaaaatcgttatcgttgatttcaatatcagagtatgaaccagaacgaaattcaattcctgtcacattctttttgaaatgttcgaaacgtttttctgtcataaagttgagggttcgttttcctacagcagcgttaaaatcgcctttgtcgtttgtccggttaacgttgctgaatgaatgcaggatcaggacatagagccataaaggatctttgttctggttgtattcatcacggaatttcagatactcttctttattgtctttccccagccccttcgatgcaatcaattctcgcaccggagacaggtcaggaagcgttttaagacgctcatacatatcaatcagcgtcttatcataatcgttgcttagaacgggtttagggacgtttagcgacacactaaggccaccgcaaaaacaatcaatgaaacgcatgtatgaacttctttcggggaacagcttgaatagttcaggtaatagcgattgcttgtttcctgtgtatgggatcacaccataataactcataattcacaaagccctttttcaaattttgcaatggtatcgtacttgtaaccacgattcactataaagcattgagtttcacccaatttattgatcatgtcaatagctttctgttcgtctttcttacctcttaattgtaaggcaattcttacgatctcttttagtgtttcgtcgttgacttcttccagtttaaaggaatacccagcgattttagcaaaaagccccttgcgagctacaaggggaatgttgtcatagaaaatcacggttcctttgttgtttttgcggatactaaatcccggcacggttcctaatttcctctaaagtgtcacgggaagtaatctttccgttgacatagtatgtgatcatagcatctttccagccttccggcactttctgttccagagtatcaatggttttaaagttaacaccatcagtgatagtcatcaacaacccttttttactctttttccattcagcgccttttggacatttatacacaccagtccacacaccgttaattttgattgcgcacattttcatcgcatatttttgagtgtcgcgggtaacttcttgaagcaatccgccgcccataccaaacgcgatgttttcagacgcccaacggttagactccatccagttcaacacccgattgattgtttcagggccatgaatttcatcgccttgaatgatccttactgctgggtgtagtactttatacccttttgagttcactgtatagccaaagatacgacccagttcttcaagagcgtacatgatattgtctaccatatcaccagaatccggacgaactaccagagtaccgcccttagaaagaatcgaatctttatattctgcgatacggcgaaccgccgctttaaaatcccaggaatcatacacacatgcatacatcccttcgccgaagatctcaatactgtttttgtacgcaaggtcttcgttttctttgccgtaagaaacggtagtggaatgttcgcgagcaggaattgaaataccagccgccatttcaccatcatcaaacgctttctgacaatcttcaaacagagagatagccataatcagcgcttctacggtatcagtaccgaggaagttatacaggtgcgcgaggccaccaataccagcggattcagcagaagaagttccacgtgcgccgaagtcatgcaaacgggtacgtaacaccatatcaaatgcttcgccttcgagatcagaggttttcttgagatatttcttcaacacttttttacattcgcgggatagagttgctacggttgaagggaaccatactcccctgatcgccagggtttctacgtgtcctgctaaccacagcgcatttttcccagcgtggaaagttgcaaccggatttttaaccgctactggagttccttccggaatcgctctgaattcaagagggatgtaacccagttcagcaatttctttccaacctttgtagttgaagatttcgcgcccaaagtgcattttgtacaaccgattagcaaaatctacgttttccatagtcaccggacgtgataggatttgcgcaaggcggttacagccagccgtaactacttgatcaaatttaccaccacgagattcaatataaaacagcgcctcttcggagccagttggatattgcgaccagtgagaaaccttataggaatctacggaagtgatgatgctgttcagttcttcgaaagttttgttgttcataaacgtactccacgttttaggtttattttaaaatacccgatccagtcgttcgggatggattgtattgtgatatttagacttacaatccttactggtttttctgccattcgaacagaaaactttgtgatacgttgtctttgtgtgtttttctttgcacacaggacaaacaatcacagaacctattttagcagccttagccacttcatacaagttctttacatcaatttgtctttcttttgtgataacccgaccacggaattcagcaacaacagtttcatcacgtacagaaccatcactatactgaactttttgtttactactttttcgtttggatcctgatatttgagaggaacccgataaaagtttacggagttctaaacggtctttataagcaccacgattaacgcagaaatattcaccgtcttcttcgtcatcaaaatcagcccaatcttctaaagcctcagcttcatcgctcatagtggttccttagaaataatctttgttgctcaacaggtaaacccggttatcgttgtagtcaatgtaagcatcccaccaaccagcacaatcaacaccatcaacttccaacgcctggataagaacgctacccgctacgttgtcgtattcgtacattgcatgtaattcatccagcattgcttcaacattggcccgtaagcctttaccgttgttagcaacaccttttgcttccaggcaatatccagcataagttgctttcattacgatttccatgatgtttatccttctgagttagtgtcttgtctacgggagttagaatactactataaccaacccccgtcaacacctttttaccaactaatgtaaaaagtgaattcacttacacggcgatctgttttcctttcaggaatgttgaaaccgaaaacttcgcgttcttcctggtttcgatacgtttgattgtacttactagccagagaatttgtgatcttagcggcgttgcgtttttcttctgtatcgaattttagcccttcttcttccaaccattcagaaactcgttggaatgcatagcgagtacattcaatacccagacaagagccgatatcgtgcttcatatcatagataaggttttgttttgtcgcgtgtttcagaacaccttttgtgattgtatcccgcgcatgttcgatcatcttagtattctgatcgttgataatttctcttgctcgttctgcgagagtgggtgatcggccttctaccggagtttcgccgtcagtaccgatactacgtacatgaatcatattttcacctattgcgttattaacagcccatctttcgtatgtttcacgaagtaagggcgcatgttcaattaccataaaaaatccaacgttgggggtttgatattgatccctaacgtatcacacacatcgttcaatacactttctttgaagagattgaaacatggaaccctgtacaacctagccaatcttacagcgatcgcggttccacctttaacacatccttcacgttcttccgcccaaaataaaacaaaatcagttggattgtcaagattttcacgaagaacttgaatcgtgtttcgtgcataccttctttgaacgtattcattctgtgtatcgaagttacctgctacctttctggcttcgtcagcggctttctgtgtgtttaaatcttgaaagtcgatgatatcctttccgtttgcgaaaaggccgttaaaaccgttctcaggaaggattatacatctgttatccggattatagtcaaacagaaaatgactatccataccaggagcgccgccagaataagccctgatcccgcgttcgttcaaagcacgtccgattttaacagcaatgtttgcgatacgttcaggaggtttacggctaccgatcagggtagccgcttttgcatcaaccagaatctgattaaaattcatggttcaggattttgccccatacagggcgaatcatgttttgggcttcggttacaaacagcttcttagccattgctgggtcttcgaactgttcgaggaaaggcccgtgattacggctgatttcttcgatagcatcctgaacagttaagcccataatgcgaccgaaatctttagcagtgatcgaagccagatccagtttcgaaagaacgtttttcacacggttctctgtaaggtaacaaacaaactcatcgagttggtttttgtctttttctgacaatgaaaccggagcattaaagcgggttgctttcttcgctttcttctcagtgaatttggttgttttgcatttgattgcaacgcgttcaccgtttggcataaaagcaggtgaaacaggtttcattacaaaaccttctgcaatgttgccctcttcaacgtccatgataggatatacgaattcgccatatactgtgttatcgctaccaatgccgctatttgctttattcaccacagattcaaacgtgatcggcagttctttgatctcttcaaaagtaccgtatcccaacagcggggccattttcaggccatgagatcgagagataagcgagcacaggttatccggaaggaattcaccatttacacggatatcgaatacgtagaaatctttttcgccgtaatcaacatctttctgtacaccgcgccccgcaaattcaccgtagacttgaataaccaaatcatcatacgttccggtctttttgagggtttcccacatcttacggatcccaggtgaatactttgcaactactgctgaacagccataaaaatcttcggctggcttcacaacatcagtacgctttgcgggggtaacggtaacgccgtcatcggtgataaaactaaagttagcaccgtggatcttttcacgcgcaacccacacaccgccagtaagcccgttcataattacaccattgatgaacttaccttcataatggttagtcagagaagaatatttcttaaacataatttaacctttcattttcacacgtttttcgacttgataaagtgctttacgcagcaacttcacttttacttcatccagaatgacatcacccttaacgaatgcatctagatttgatttttcagcattagcagcattgataaccgctattgtattttcttgtgtatatcccagacgtggattaatacgttccattgtacgggcatatgggctacctggtttattgctaaacatcttgccggaatactgacaacgttcagttgtcatcaatactttccaatcttccagagtaaggtcaaaagaatggttgttctttgcggcgtgttcatgcttgagattgtatgaacgcgcaatacgcagatccagttcaatagcagacgcacggcggcgatgctcaatgagttcggggctaagggccacgatctcaggttcttttgctttacgaaccgcttctacatcaggtgcggcttgatttggttttacgtttgaagtagcaatactagcccaacgatccatcgcagatttacgcattagataatccccgcatcttgaaacgccagcgccatagaggtgttaagatgttcacgtttaaacggacgaggtttcttttctttcttcatcggacgtttagcacgttctaaattgtacacacgcttacgatggatttcgatcgcttcgcggcgcattgcatttttaacagggagatttgcagaacggaacgcgcggatacgttcaatttcctgtactacctggtaaatatcgccgttatctaacccatgttcacgggcaatttcggcataacctttacgcaaatcattgaatttgaaatgaatttgcactttttcggcttgagacagttcggaaatgctacggtgtacaattttcatattattttcctttggtagaatcgatttttgcaactacattcaacacgctatcgtttcggatgtcaacattttttagaacaaaagttactaccgtatacactccagcgctcatgttgaaattgtcaacaaacgggatctgctgatcatcaagagtattaaccatttcttccatgtcatttggatggtcaacgttgatgaaaatactttccgatacatgatttttgtatcgagttccaattcgttcatcgagttttttacacattacatcaactaacatttgtttgtcaatgcctaaaacaccagagtagatcacatgatatagtttcatacaatatccttttccgattcattaacaattgcaaaggaaaggaatgtaaaagcaacccctaacccaaccatccagatagccgttaaatcaccatacattgatgaatacgcacccatcacttctaagcgatatcccagcaagaaaacgagatacgccaacactttatcattcataattcctcacaaaacgcccatgctgcatggtaaacgctcgcgcctttgtcttcgttcatgcatacaacatcaaccggacacacaaccctgtacagaacaggatccccacctatagaacgcgcggcccttccagcatatatacgagctaacccgatatcagcggtaaagaaaacacggtctaaatttttctttctgcccttttcagacagagtatcagaatcacagggaggcaataacatgctttcaataccagcagcagtacacgaaccgtgataataaacaacgttttcatttctgcaatgtatcgttttcatgtatcctcccttaaaaagatgcttacattatatcaaatggataaatccatgcaagaaatttctcggtctacatcttcttttgttttgttgacatacgccaggtattcatcggtatacattttccgctttctggctattctttcagcagccgcgcacatttgagcttctgacagtctataagacaacctttctccaaatccttcaacagttagacgaacgaaaggaaccgcagaagttataatgtcattaccatacgcataaccatttttagtaaatacggctttgttgaatcgttcatggtgtacgccttcaacctcaacctgatcaccatagtaagcaatagtatcaacgcgatggttaagaatgatagcaccagattcaatgattttcagtgcagcggcctttccttgttcgcgagcataagccacgatttcataagaaccgatatctatagcggaaccatgattaccaacgatgtaaaacatggaattaattaggtgcttagagatatatgcatacgttttatacatctgatactgttcattacgcagacacatacccgctttgtattcacgtcgtaactgcataagattttgaatcacttcatcaatacgccatccgttagggaattcggcccttttctcacgtgcgatatggatcaacgcgtttccatacatcgcgttaaacgtcatgatccggatcccttcaacgtaaccatcgataggggcttgccatgtaatagggctatatatcggatcgtggtcaggacgcattttaggggtatggtggcgaaggaatccaacgtgagccgcaaaaagatcttcaatctcacgggagtaatagttgtaagagtccatgtcacggttgcgggaaaattctacaatgaagcgatgtaaattgattttcatatcatataccttatggtttaaagttcttccggcctatccgtcgaacaccctaaccatacaccactgtcagaaagcatgtcaataaataatagaaaataaactggagaattttacatgaagtcatttaaacaattcacagaaagcaccttaaccgaagcgctgatcaccttcggaggccgtgcttatcctaagttcggtcaggttgttattcttgctggcggtgctggttccggtaaaggattcacactggaaaaactgctaggcatcgaaggtattaccctggacgttgacgccctgaaaaaacttgtaatgggtagcgataaactcgcagcagagatcaagaaacaaacgggtcatgatgtcaaaacaatgaacctcaaaaacccagaaaacgtatcta

SEQ ID NO: 25 - DNA, 113637 bp, Unknown
  bacteriophage strain capable of infecting bacteria of the genus Klebsiella
aattaatagcctgataactattgaggggagttattatgagttctctcattttgtccgggaagtagttgctaacgtgataattaagccgcaaatggttagctggctaatagacgtagcgcaggaattagtagcaaacaaggattcactatccgaaaaagttacatttgaaattaataactttgaatttaaagcaacgctaatcattagctaactaatgataagcctgcttataatgagcgggcttttttgttttctacgccccaccagcaatggcctttaataaggcttccaaatttaaagcgcttagaatgcgttacagagcgttctaggggcatattagattattaccgctgccggaatatactgtatatttatacagtaggataacctgtggataagtctggggatatctcgttacatcgcttctcagcttgtcaaattattttgtgctgtggataacttgcccaataaacgggagtgcagcataaaataaacgcaagcattatttcgcgtttttataaaaataatcatttgtctagtggataactcattaaatttcatttttgctttttgtataagttactaacagggtctaaaacgctatagaatcgattctaagcggttttagataaaagccgatgaatcataccgggtaggtggcgatctcctcacctcgtgtgaaatagattttgtcaacccctttttaagaaaaatagtaaaaatattcgttgactttctttaatagctgtgcaacgtgtgcgcgcttcctatctatcgtgcaaaatcttatttggttagctgccctactatttgatataatatagtaacacttgaaactataacaggagatataaatgaactttgaaacattagatatagatgtaaatgacgtactcgataacgtctactatgacgagacaagcccaagctgtttacgctggaaggttagcgggccgggtaagacgtttcacggcgtggcgggaacaaaacgcgaggatggttattattcggttgctattaataacaagcgttatttagtgcatcgtgtgatttgggtactgtttcattataaaatagataggctgctagtaattgatcatattgaccgtaaccctagcaataatttcattgacaacttgcgcctagtgactcaggccgaaaacgccaaaaataaagggccgtaccgcactaaataaacttacgcttctttacaattctcctcttgcggctaaacgccattgtgttattatttatctcgtaggacggcaacaacgaactacaaggcggaaaacatcccgccccgctctttaaaaatttgggattctataaaaagcgttatcggctttctttactttataagggaaccgaaaacatgttaaaagaatcatatatgctgagtgacgtagtaaaaacgtttacagtagcagacgccgaacattttatagagacttatctaaacgtgtacgacgtagatttagccttcattcataaagacggccaaatcattatgcaaactgaacgaaatcatacactccactaattaaaggttgacaacatgaaacgctttgtaatatcatctaaaccggcggcaaaattgaataaaatggcaggttccgaactggtcaaaatgcagcgcgatatgaaacgccgttatcggtcttatcagcgcggaggtcagcaaggcttaccgatgatttgggataacatgatgcgttatctaaaatctttacaaaataacgtttgacaatctgccgataacgctttattatagaatctcaataagcaacaccgctctttaaaaatttggaaaagtcgattctctcagtaagggtaattgagttttctgttaacactctagcagtaaaagagtgttaaccggataacccaattaaactaaactggagtaagaaacatgcaaaacgttaaaaccccaatgatcggtgattccgtttttattccttttgttactggcgacgtaagtaagccgggcgaaaatgaaaaaatcggatatatcaaaggggcggcgatgatcccatttgataaaattaatgcggtttacgccgaaacggaaaaagcaaaaaacagcgacgcgaagatttacagcgtccgggtagattccggcgacgtggtgaaagtcattcgcaaagatgataaatggttggctgtcgcttaatagccaataagtttaaccccggtaaataatgggatgcttcccactatgctagacttccgatgtatattccatgcagcgcaagcaatgttatggtgcgcaaattaaacttatgtgctggaacttatatcatgctttgaacggcgattgtgagttaacacgaatctatagcgtgaaatagacgtaatagcgtaattattaaaggcagcgtatatatacaatgccgctttaaatagctttaaattgaaaactaaaataaagagttttcgttatatattctagctagaatatatagcggctaactttctagcctaaacccttaaataaaactggagatgtatcatgactgctactaaaaccgaaaaatttgcatggaacgaaacaaacgccgctaccgccatttctatgtatgaaggtatcattgcttccgatggtctggaggtggctaactcgcaaggtctgattgacattgcaaaagcggttggcgctgaatctcatgtaaaggtacgctctaaactggttagcgcaaaggtttatcagaagtctgataagccgcgcaaagtcggcggcggttcctccctgcgtaaagctcactatgtgcgcgttctcactcagcacgccatcgccgacggcctgatcgaagatgccgacggcctggcaagtttggaacaaatgaagctggatcaactggacgttatcgcccgtatggttggcgttcaggatgaagtaaaagaatcagcagaataattataatgcgcctccctagcggggcgcataattaaatattttgccccccataactggagaaataaaatggctttgattaaaggtgccgttattaaattaacgggaactgttgtagatgaattaatccaaacgggttatcaagatgccgccgtaatgacgccgcccagcgtcaaagtacctgaatatattgttttgtgggttaaccctgatgctgatacttacggcatggctatcaatcgggaagtatttaagccggaaatgttggaattatcttcccgtgaaatttatcttctaaattacgctttcagcgtagaagaaaaggagactgtaaaatgatcttcttcccgactgaatccttaatttttattgccggatttttcgccgccgcttgtctctatggttactataatttcatggaaataggcagtgaacaaatggatttattccgccgtgatttctggttcaagaaagcgaatacttgccgccgctggtcaataatctttattattctagccgtagcttttggaatatcggccagcattattcccgcaatagtttaaagtcgcaaattataacgccaccagcaacaaggcgttatatttggcaattttgcctatatcccattaactggagaatttagataatgatcattgcaattgagaaacaaaaagctattttaaccgccgcaaataacctcaatttttggggtaaacgtctgcgcgctaaaaagctggagatctgcgacgaattgagcaaagagcattacggcacggcgaaacactccagcgaaatttgtgattggctggatagtaacaagcctgttaaacctgctgccgaaaagcgtgctcaacgtgttgcagtggaagattcccgccccgttgccgctggtcagcttaattctagcgtagaaagctggaaggtaattccgggccgccgttttctgttaacgtcgattcagaataataccttccctcatgctaatttttggaaaaccttacaggaggcctcgaaatacctcggcgcaaccctgctagtgagcaaatacgcctacaacaaaaaaggcttccagaatgggcaaggcaacgatgatctgaaatatgatgatgctttctcagatttcatttgtaatgaaaacgtgtttttgggcagccgtgaaacaggattcgcattcatggcggaaattaacattctgcctactgctgattttccgctgtccggctttggcgagactgcgaccgcctacggcctgaaagggctggctattggtcacgctaaaatcaccgctgaaagtgtcccggcaatgaagggcgacattgtgcgccgtatgtattcaactggcacagcgacgctgaaaaattatattcagcaaaaagcgggccaaaaagccgaagcgctgcataattacggcgctttgctggtagagatcgacgacaacggcaacttctttgctcgccagcttgaaacgatggacgaaagcgggatgttttacgatcttaatcataaatttactgttaacggtggcgaagaagtaaccgggcatgttgccgcgctgcaatatggtgacattcacgccgaaaagctggatcacgctgtcgcggcggcaagctgggaatacaaccctagcgaaaccgcgctagtagatatactgcgccctcgttaccagattgtgcatgatgtgcatgactttacatcacgaaaccatcataaccgcgctagtggcgttttccttgcgaaacagtacgccgctggacgtgacaaggtaattgacgacctgatcgatacgggccgcgtattggaggcgatggaacgtgaattttgtcaaacggtcattgttgaatctaaccatgatcttgcgctttctcgctggctggatgatagcaaggcgaacattcagcaagatcccgcgaacggtcatctttactatcgcctgaacgccgcgatttatgaggcaatcgaaaacaaagacgatacttttaacgtgctcgactatgccttacgtcaagtggctggctgcgattttgctgcgatcttcttaactacagacgaatcgatgaaaatcgcgggcattgaatgcggttcccacggtcacaacggcgttaacggcgctcgcggcaatccaaaaggattccgtaagctcggtaagatgaacactggccatacgcatacgcctagcatttacggcggcgtttatactgctggcgtcgctggttccctcgatatgggttacaacattggcgcgtctagctggtcacagactcatctaatcacctatgaaaacggtcaacgtaccttgattgactttaaagacggcgctttctttgcataacaaaaagccggggcaattgccccggcaataaataacccctaaataaataagctggagaaataaatgaaacttactttcatctataacaatcgtaaatctttcaccgcgtccaacgtcgtagaaaacagtctggttatcacccgcgatagcgaagggcgcccgcatgttagctaccagaaagttaacacggtggacggcgacaccgttttaaaagctctagccgctatcctcccgcgccccgctgattttaaagaatccggcattgtgtcgcaattagtcgccgctgattctattctctatgaagctgatatttgcgagatcgtagagattgacgccgccgccgctggccttatgtttatcgtcgtaagcgaaaatgattatgatgatacttatctgttaggcgatgtaatggattattcttctagcgaatatacgccgccgctcgcaattgtcccggtaatggctacccggattaaaccggctgaattagccgatgccttaactttattcttctgataattaacaaagcgagttataatatagctcgcttgattaattaccaacaaccccgaaaccggagaaatgaaaaatggcttttaataaactggcaattaaggcaattaagttatgggatttagacgggactgttattaattcctttgcccgtgtgttcccgtgtatggatgagaaaggtaacttagatttaaacatgtacagggaaaaggcttgcgttcatgatgcaatcatgaccgatacactgttaccgctggttgaatatatgcgggcatcgcttaatgatcccactgtattaaacatcgttgttaccgctcgttatatgagcaaaagcgattactatttcctacggaaacaacgtatcagggcggggcgcggtggtaatatccagatactatcccgcgatgtattgcaccgatatattggcgatgctgattataaagaggtgtactattcgaaagatggtatctataaaacgcattatttcgaaatgcttaaagctgaatacccgaacgctactatcaccatgatagacgataataaaggagtgttagccgctgctgctgctgctggccttcaaacgatggacgctaccgcaatcaacgatattctatctattggtgtgcgccttgcgggtgagtcattcatagatgaagcgctggatgatgataatgattatcaatatctttgcgagcgtttagctcattgctgggaaggtatgaccgaagaagaaagaagcgactacggaattaagccgcaacaattcattcaatcgttagccatcgcatcataagaaagctaatagtaccctagcgaaatagttagggtactaatagttagcaggggcggtaatcggactaccataccaccccccgaccctctaagcccacctccatgtgtaactttatgaaaataggagaaaaggctaaagggagtattaaaaggagcagcccgaatcaaagctactactgccgctatcgcagtaagaacttcccgagtcatacccgctatacgtagcaactgccgcggttgtagctataattgccgcagtcgatccatcatcgctacgagaacttcccgagttagatgaaggactccccgaaactttccgagaattatccgaacctgcccgcttctgcttgcgtctcgctacctgcggtgtcactggagggatgtagtacgggttgctcgggtcattccgaagatcgttcatgactcgttggtgtttcgagatcgctacttgacgttctgcccgagtttgaaggatttcttggtgcagacttttgttacgaagatctgccgctactaccgcgttccgcaggtcatgtgcccgcacaccaaaccaaactgccgccaggaaaaagaatgttgtgaaaattagtacaatagtcatgtttacaccatacccttagtaatgtagattttgtttgctgattctagttctgccttgcattcagacaggtttaactgcgccttatgcagcaaacgggtttggttgtcataagacttttgcaacaccccgttagtgcgttctagctgtttgattgccttaccttgctttacggtaatgacaaatagtacgattgagagtaaaacaagtgctcctataactacttccatagtggtcctcctagatggttttaaaaaatctggtttacttggcggttgatttaatttataataatattatattataaaagtcacttgttagcaagtgagattttgaggtttttatgggcttttttgcaggtcgcataggagggaagaaggttctctccctaacctcgggcaataacaaggatattaataaccacacaaataatggttgggacaccatattccatagcgatatgcctcacgtcgtcatcttagagacccatgaggttacactatgggacggtggtgattggtatcgctgttcgcgtatgcccgataggattattcaggtactgtccgcagactacgacagggttgtattaactgaagttgagtttgaggatggcactagacgtttcatttacggtacatctctgggtgtgggcgctaaagcgtataacgcttactttagtaatactgtcggttcccaggcttctgcaggtactatggctagtatgaagactaacgtttgtgcttctgcagacttacacatggatattagtttctatttcgaagagactccaggtactattaacgagaagctacgagatggtactgggtgtatgtacacctggggcgttaactcagaatggggagacagagggcctgggccgccggttggagctcctatacgaccaaactttgagactattattaaagctggatgggtgctctataggggggcttttagtggcaatatagccggttctgtgtctccgcccaatagaccacttactattggtgttgatgctatgcgccatccatggatgcgtaccacaggagttaatagtatatgtttgcgcggtgagactctcaaccgtaatatgtacggacatatggggcctagatacggtatggggtctaatcccgttggtggtccttatgctcataacatccagactgagtcttatcaggaggttcagtacaaagcaggttttttccgtggtccgcccaataactttatggggtgggagaacacagataacaacaatgctggtagtggttggggtaacaacgccatttatagggataacaacttccgtgttcctaaacgtgttcgctggtatattactaatatgaaatacaatgggcaggggttctactcagagaatgtgttcagctctcggaaccaggagattaaaatcagccctagagagtttattgtaaacggtataaacctaatgaacactgggtggaagtttataaaccagaacgatataaactatagcccgggtaacagaccggacatcaaggttattgcaaccaatgttgctagatttagtggcaaccctactgttggtaataatggatatgttcacttcaaccaacctctaactcgaccggataatggtgctgagtttggacaaggtaatgtgagtgagatgcatgtaaccactgtaggggtttacaattttagatctgatgcacagtggtacgtaaaatctaacccgccggagattggaaaccagtggggtcctgtatggtccgaagcaactcgccccctcagactagtgggcggtactgcctttgccgatataggaggtaacttacgtactagcggtaatgctagtcaccacctggctaccttgtggttaggggttaataactcccgaaatggggcttgcgtcgtcactctagactggaaaaacgatgagtggattgctgctgcagggattggatgttataaccctctagaagatcttacccagtggagcgaggtagatagtaggctgagaattttcggaaatcacttccagaaacgtgtgcatcaaatcatgtgtcttccagttaacatgtgtgtgccgttccactttatacgcgggaccgtaacccagtgtggggttattcctgggaacaacgccatgcaaatgaaggctatgtgggcacctactactaccaactctgccactcagggcgattatgccattatctattggctgatagctagggctgatggtagtgttgaggtttgggttaacgttgggatgagcaatattatgaacatgcgagtgatcctccctgaggttaggattgctgtgcaaaggcttgcctaaaggaggcaatatgagcaatgatttaattgtacctgatgcaatgtctccggaaggcatgctagttatagaagcgtatctggagtctggcagcgacgttgcgaaagcagcgttagctgttggaatggaagaacccaaattccgggagattatgcgtaagcctgaggtcaaggcttaccttactgatatctttatggagtctggtttccgtaaccgtgataaattcttcggcattctagacacggttctaaccatgaagatggaggaactggatgaaactggaatgggttcagagatggatattatggatatcctcaaactcatgcacaaaatgaagatggatgagatgaagatgcagatcgagtatgagaaggtgaagcaagctaaagctccaatacaccaaaataatactcagatcaacttggcaggtggtcacgactctaattacacggatctcctgtcacgcattgtgggggcaggtaaataatggaaatctcacgtagttatattaatacgactgacgtggtggattttggtgttgataaacgattctttaaattcccggtgtccggcttgctggccaccgagggtatcactccaaatggcccgcagtgcgcaatcataaacgcactggaagacccacgtcaccgtttcattacagcatgcgtatcacgtcgtgttggcaagtcgttcattgcgtacactctaggcttccttaaactcctagagccaaacgttaaggtgcttgtagtagctccgaactactccctggcaaacatcgggtgggcacagatcaaaggtctgattaagaaatacggccttcaaaccgagcgtgagaacgccaaagataaagagattgaacttgctaatggttcgctctttaaactggcttctgctgcacaggctgactccgcggttggtcgttcatacgactttattatctttgacgaagcagcaatctccgatgttggtggtgatgcttttgatatccagctccgtcctacgttagacaaacctaactctaaagctctgtttatctctactcctcgaggtggtaactggtttaaacgcttctatgagcagggattccgggaagaccttccacagtgggtatcgatccacggaacgtaccgggataatcctcgcgtatctctcgcagatatcgaagaagcacgtaagactgtatctaagaactacttcaaacaggagtacgaggcggacttctccgtattcgagggtcagatttacgacaccttcagcgtttccgagcatgtgcaggatcttgcgggtatgggtcacttctttgcagcagaccatgagttcgagactattctaggtatcgacgttggttacagggacccgacagcggtactgactattaagtaccactatgatcaagatgtgtactacattcttgaggagtaccagcaggcagagaagactacagcacagcacgccatgtatatacaacactgtatagaccggtacaatgtagaccgtatcttcgttgactccgcggctgcacagttccgacaggacctggcatatgagcatgaaatatcttctgctcctgccaaaaagtctgttctagatggcctagcgtgcctagctgctttattccagcagggcaagattatcgttgacgcctcgtgcactgcgttaattcacgcactccagaactacaagtgggacttccaagaaggggaggaaaagctctccagagagaaacctcgtcacgatgccaactctcacttatgtgacgcactgcgttacggcatctactcgatttcccgtggcaaataagagctgagttggaacggatagtagtgagtacaaattccgttccaactttataaaattcactttacaatttcgtgtgtggcagttataatatattcataccttgagagatctcatagacatcagggtgaatgagaggaatatttaattgctgtacccgaagtagtattttcccgactaagaggagaaacactttggcttccaatgtaaaatataagagagatgcaatctccataatgcgtgacggaatcaaagcccagtacaaaagaggcacctgttgcgccatttgtgactcacaggaaaacctggagctacaccactactcgactgtggccttactagttaaaaactttgctaaagaattccagctggatttcactgactcagaagtcgtcctaagtaatcgggataagttctatcaacattattggcatgagctagtagaggacacggtcactctatgtgtctttcatcatcagaccttacacaaggtctatacgaaagaaccgccgttgttttcggctaacaaacagaagatttgggttgaaaaacagcgtgaaagatgtatgaatccagaagcccctcgtacaagcaatactggcgaaagatcaggctttgcgaagtggcttccgactgacgtcaagactgagaaatcaggattcgcaaggttcctataatggctattcgtgactggttagttactaaactaaaccgcggacaacgcataatcagggacttggaggatgttagtcaccgtactaacgtcaaaccattcacgactggcaaagcctattcgtctatcgagatccttaacagatccgcgaacatggtaattgacagcgccgctgagtgctcctacaccgtaggtgaacagtataaaacaataacaacctatggcacgatcaggggtaaaactcttgagacgctgcttaatgttcgccctaacccttacatggactctagtacttttagacgcctaatagtgtctgaccttctattcgaagggtgtgcgtatatccattgggacggttcgtctctgtatcatctgcctgctgccttaatggaggtgaaagcagatgacaaaaaattcgttaacaaattcgtctttaataatatgatcgactaccgcgttgatgaaattatcttcatcaaagataatggccagaatggtggtattaactcccagattacaggtcagtctcgtgtagctaccgtgattaactcgcttactaagcgggagaaaatgcttgagttcaaggagaaattccttgacaacggtacggttatcggtcttatcctagagacagacgaaatcttaaataaaaagctccgtgaacgtaaacaagaagagcttcagctggactataaccctagtaccggccaatcaactgtgctcattctagacggcgggatgaaggctaagccgtactcccagatctcctcctttaaagatctcgacttcgaaaacgatatcgctcgttttaacaaagacgtatgtatcgctcttggggtcccacaactattgatcgacggaggtaacaacgccaatattcgaccgaacattgagctgttctactacatgactattgtgcctatgctcaataaagtatgtagctctcttacgttcttcttcggttttaaagtaacgcccaatactaaagacgtagtagcactaactcctgacaaggagaaagaggctaaattcgtaactgcactggtcaacaacggtatccttaccggtaacgaaggtcgtatagagcttggttacgaggaactggctgacgagcagatgaagaagattcgcatccctgccaacgtagctggatcagctacgggagtaagtggacaagaaggtggcgcaccaaataaagacgaggaaaaagaatgattgattataacgctttaaaagcactattccctaacggactgccagagccgcacaatgcgatggcaactgttaaagcacatctcacttaccagattctgcgtaaggagtatgggtacgctgctactaaccgtagaacctggaaacagtttgaggaagcgtatgaagaagcaactaaacctgttactgtagcggttactggtgtcactatgtcacctaagactcttacaatcgaagcaggtaaaaccggaaaacttactggtaccgtagccccagctaacgcaaccaataagtctgtaatttacacttcttccgatactaccaaagctaccgtagcttcggatggtactgtaactgttcctgctaacctagctgcggatggtactgtagtcattactgttaaaacagctgacggtaataagaccgacactgcaacggtaacagttaaggttcctgtagtggatgtataatatctgttaactggggagcttcggctccccatttttatatgctagtgcataactattttcagtgtaaccaatttcgactgcctactaattccacacaccgtatgggattttcaaataccttttgacattcgcgatttggtatgtaataatagtatctgaaaactgaggaacaacacgaaagtgtttggagcaaacgatgcagaatattaatcttaatgctgagattaaatctgttaaagctgtcggtgagggtgataatcctcctttaaaaatcaaagggtatgctaacacgattaccaaagaccgcgccggcgacgttattctctccgaagcgtggactacaagtaacgccctcaagaattttatgaagaacccgatcatgcttttcggccataaccacagccgaccaattggtaagatcctagacctggtacccaccgagtccggacttatggttgagggtgaggttagtgctgctgatctacagatttattcattaatacgtgatgaggttcttaaaacgttctctgtaggcttctatattaaagatgccgagtgggacgatatgactgaaacgttcattattaaagatctggagttactcgagatctctgtagtctcggttccctgcaaccaagactcaacttttagtctttcgaagtctgtaaaccataatgattacatggagcttcgcaagtcttttgtaaaatcttcgcaggtccagcctgttgaacaacctgaactttctaatttagagaaattcctagtagccgctggttacgctaaaggataatggagaaataataatgtcttacgatatcgcacaactgtctaaagatctgggcctgggtgacattgctgagcagcttaaaggtctaaccgcctctcagaaagctgaagaagctcgcaaatttgctgctgagcaggaagctaaagagctcaagcgtatggaagacctggttgctaaagcaactggtgaagaccgtaaaaacctggcagaagctctggagcttgtaaaaaacctggatgagaaatccaaacagtccgctgaagcgttcgttaaagcaatgaactcccagcaggaagaaatcaccggtctgaaagaagaaattaaatctctgctggccgctcgtgaaaatggtcgctctttcgtagctgatggcgttgctaaggcaatgtttggtaagcaggaagatttcgaagacgaagttgagaaactggttcttctgtcctacgtaatgcagaaagatgtattcggtactaagcgtggcgaagcccacctgaaggcagttaacggctcttcttctatcgaagtttctaccgaagcgtacgaaaccatcttctccctgcgtatcctgcgtgacattcaggctaaactgattatcggtaccatgttcgaagaactgccgatgtctagcaaattgctgaccatgatggttgagccggaagctggtgaagctagctgggttgacgcctctacttacggtactcctgctactgttggtgcggaagacaaaaccaagctgtctgaaatcaccttcaaaacctataaactggctgctaaagcgtatatgaccgacgaaacagaagaagatgctatcttcactctgctgccgatcatgcgtcgtcgtctgattgaagctcacgctatcgcaatcgaaaaagcgttcctgaccggtactggtgctgctggtactccgaaaggtctgatccagttcgctaaagacgatggtaaagtagttgctactactgctaaagctgacggttctgttaaagttaccgctaaagaaattcacaagctgcgtcgttcactgggccgccacggtctggatctgaacaaactggctctggttgtttcgatggatgcttactacgatctgatcgaagatgaagagttccaggacgttgcacaggttaccgctaccaccgctatcaaactgcagggtcaggttggtcgcatttatggtctgccggtactggtttctgagttcttcccagctaaggctgcaagtgctgagttctgtgtagttgtttaccgtgacaacttcatcgttcctcgtcagcgtgcaatcaccgttgagaaagagcgtcaggctgagcgtcagcgcgatgcgtactacgttactcagcgtctgaacctgatgcgtttcttcgagaacggcgtagttgctggtgcttacgctgcttaatttggctatactgccgactaaaggagagcttcggctctccttttttattgggtaaaatatgcaattcatgacagattctgattggagaacatatggaggccttaaacgtcctgacttagagtcaaatatcccaatgttaatcaaggcagctaatgctctgattacgcagctcctaggtattgacgatagtgctaacgttgtagacgttttgcctactaaaccagcacgcaaaaaatacttcctgtcttctcccgtgcctagcacgatcactaaaattacgattaacgatcaggagatcgataagtcgcaatataagaactacccggatggcacgctcctgctgaaattctctcctccagaggggtatatggaagtagagtttactcagaccggcttcacctcgattcctgacgacctggtactagcagcatgcttcctagttgatcattgggtcaagaaggactaccgcgagtctcgtacattcggcggagaaaccgttactttcaataccactaaatctggcgtaccggaacatatccgtactataatcgaagtataccggaggctgtagtggcgttgggcgatctagctcgacagatagttaaagaacagctggacattatgagtggtggtagccactctactaagaacaccgtgatatatagtgcggaaactatggataaccacaaagatggcaccataggcaaggtatccttccgatttaccaagccggtatcggaggatctactaaatgttcgtacgtcctctattctaaaagctgtctcgtcgtcacttaatctggaaggcgacgttggtgttatcgataaccttctaaatagtatcactggtaaaaaatccaaaataggaagaaaacgatctaccggtagggtagaagttaactttggagatccttcagatgctgacaacggttacgctggtgctatttctggcgcttctgggcgtttcgtctcaaacacaaaccttagagcgttacttgaactcgtagcaaaagaatacttagtcaaggatatgaaaaaagccggagcccctctgaaattcagaactggtcgcttcgctaactccttgaaaattaaagacgtgctgttaagggaagacgcaggggcaaagaaccctgacctcaacatcacatataactatatgcttaagccttattctgtgttcaatcctgccgtctctacctaccgcggactttccttacggcctttccctggcgctaggaacccgcagaagctgatcggcgaggcaatcgctaaggctgcaagagaccttatccattctagataccggataagagtaaatcagggtacataatgaattacagaacaagtattgctgatgccctagtggaacgactaaagaaggacatggacgggagtaatcccacagagttcttcactaatatgtacgggaacgtatcccgccagacttattcgtttgagcagattaatgagttcccttacatagcagtccacgtgggtaccgaaactggaaactacctgccgtctgcacagcagtgggtttaccttgaaattcctattcttatctatgataaagaaaaggatgatattaacatgcaacttgagaaactcatagcggatgtaaaaacctctattgacactggaggaaatttacaatatactataatgaaacctgatggttcaactatcgattctgaagccactgacatgcagatcacgtcggtgtccacagacgagggtatactgtccccgtttggttttgctcaagttaacgtaacagtccggtatatgcctctgagaagagcgctggatagataagttacagctcaggagaaatttaaatgtctgtacaactattacgtaatacacgaatcttcgtgtcaaccgttactacggggttcactaaggccaatactcaggagatcctagtccaggatgacatctcttggggtcaggacagtaactccactgatattactttaaacgaagccggtcctaagccgacacgtggttcgcagcgctttaacgattcattgaacgctgctgagtggagcttctccacttatatcctgccgtatgatgacgcaggtaaacagatcctgccagattaccttctgtggcatggactggcaacaggagccgcggtgaatttagcgggcaccaccggcgtattccagaatgatactaacctagttgttaacttcaaggataacgcataccatgaactggccatgctgcatatctacatcctgactgacaacgcttggtctgtgatcaagaactgccaggttggtcaagcggaagttaacgttgatatcgacgacattggtcgtgtaacctggtctggtaatggtacccgtctggagaccttatctacgcagccgtttgcccctaacaccattgggattgacgatactctgtatgctaaacttcagagttcttatatcaagaacaagctgactatccttaagctgaagaacaacgctgttggtggtaagacctataacatcccgatcaccgggggctccttcactatgaacaacaacgtaacgtacctgacgcctaacatcatgtcacgtgttgatgttccgatcggctcatttactggctccttcgagcttaccggttctctgactgcatacatgaatgatgctgctaacggctctattcagttgtacaaggatctggtctccgagctgaaagctgtgaatgactttgaagttgcaatcatcctaggcggggagtacgatactgcacgtcctgcagctgttctggtggctaagcatgctaaccttaatatcccgtcaatcgaaaccgatgatgtgctaggcgtatctatcgaattcaaagctatcccgtctcagatggatgcgggtgatgaaggttacctgggcttctctgccaagtacaccaaaacttcgatcgccaagctgatctccaccggtgacggtaaaccggtcaccccataaggataactaatgctatactccctaatgcgggagtctagagtagtcatcgagtacgacggcagagcatacggatttgatgctctgtcgaattacaatgctgggacgtcctacgaggagtacaaggcaaatcgtaggactatccacagacgcagtaactacgcctattcgaagataactgctcagtctccttcttcaatttccctagctcttaacttttctagtaacgcgctcgagagcatattctttgagctactagggtttaccgaggtaggtggaatgtatcagatgcctctgttcagtagtaatattgaacctaaaatgttctctgtatatattattaataagaacacgagcttacgtttcgataactgctttgccaccacctgcgacttctcgctagataagagtgtcccggtgcttaacgttggtatcgagtcggggtactttgaggaagtaggccacccacagaatagctatacgcttgaccaaggtgaagtgctaccgttttcattacctcaggtatcttcgaatgggagagttctcccagggcttatgtcagccggtatgtcattccagcagcagtgtgaatggcgaagtgacagaagcttattcgatatcaataagatttataataataggagggcaatcgttaacgaattgaactcatccgctttgatatcgatgtactatgcaaagagtctacagatagaccccacgcataacattactcctgatattggacttccggtgcagatcaggaataaatatattgtggtggattttccatccactcgaatcacaaaacgcctagacttaaccgacgtgtacaaggtcgattatgacgtaattcctactgaacaatcagaccctgtccgaataaagctaattggagaataacaaatgagtattaacctaaaagatattgcactagacaccaaacagattactgttgcgtacccagggctgccccacttcaaactgaaggtaaactatgtttcccgtaagctctctaaaaagattctagaggcagcacaggaaaaccagtttgtgaatggtatcgctgttaaagtgcagaatgacgacaaatttgcagaagagttcgtcaaagtagctatcgctggctgggaaggcctaaccgttgcagatgttgaaaaactgatgttgatcgaggtcccggaagatcgccttgaggacaaagtagagttcagcattgataatgcgatgatgttagtacgtaactccagtgcttttgagacctggatgaacagtactgtgttccacttagacacttttcgtggttcaaaatcggaaccgactgcttaaagaaatagacgcttttgcagaacgatgtgtcaagggtggtgactccaagattacacgtgagcagtatctaacgatgtgtgagtctcttggagaagagcctaacccagaggtacttaagcgtttcacagaaattactgactttcctgaaatcgcgcagactgccctaacaatatataacaacttatctgataactatatcccgggtgattatcctacatacttaggtaaggataagagctctctactcgtcttctttgatatctacggagttgaagacgctgatgagaagagtctgatacttcaaatcattaacatattcgactcacatgctgtggcggcatcacgcaaacgcgttgaggcagctattaagaagtctaagatgaagtcttctaacagatagtgagtttcaatttcctccaacgggcgttccacgtgaggcttggcctagggttaatgccctaggccttttttattggaaaaaatcatgacagatagactaatacgagagttacttgtagatatcaagcagcgtggtggatccaaagccgctaaacaaatcagggatgttgaagctgctttagacggagccactcagagttctgagggcctaaatgtaagcttaggtaaacttcctggatccttcacggctctggaacgatccgtatcacgtactgccaagtcgctggagaagttatcctcgaccaccagcattacagcattagcagcgtctattggcatgctaagtggcaaatttacagcatttgaggctgatttagctaaatccgtgctcaagattaattctaacctgatggatatcagcaccactgctaacaaaatggcctctggggtcagttcagcaactgcttcatcggtgggagatcttaacagaattagtaaagttctgcttgaacttgatgcacatgcaacgtcggcagctaaggttctccagtcactgcgtgctggtgctggcctagcggatcttgggtctctagcaactcaggccaactccgaacttaatactctggtgggtagtgtcggacggataggtaaagaactggttgcaatgtctacccaagctgcacaagctggcaaagcacttaaaggtattaagggtgaatccctggcaggcatcagtggtgatctgagcaagatctcttctggtctaagtacagcagttggttcaatgaattctgaggttgctcgtattaataagttactcttagaactttcagcgaatgctgacttagccggcaaagcagtgatgagtattaccccaaacaaaggtttggtggaaattagcacggagatccagaaacttactaccggacttgcgaatgctgcaagagtatcggttgctgagatctctaaaattcgcaattctctcacttctttaataacctcaacaactgcaacgtctaaggcaatgcagtctatgggtgcaggatttgacatgggtaaagttattagcgagctaacggctgctactgctacatctacgtcagatattaataagatcactgcgtctctgaaacagatggcgattgatgctggtactgctagcaaagctctacaaagtatcaaggctggtcctaacttatcatctgtacctaatgttattggtaagatcggtgactcaatgaccaggcttcgtgctcaacttgatggttcagtatccggcatcgagaagaacttaaacgaactggcaaaagctttcgctaccatgggtggttctggtaacttgaatcatcttggtaactcaatcaaagggatagtacctacccttaatctgatggctaaagcggcgaatcaagttaacgctgcgctgtctaagatccaatcaggtaaaggtttaacagctcttcctgcacagttgaaggcatcggtcacggctctagaaagtctggagacaaaacttgcctccacagctaatatcctagatcgcggattctctaaaggtttccaagacctagcgaataaggctgctaacgcctccactcgcatggttaacaacttccagaaggtaatcccagaattaaccgccatggagttggcagctattaaaactggtgctgccatagagaaacttatcgccaagcgtgtaagactcaatcagactagttcaggtggtggtaacatcgatatggctgggctactgagtgtagctaaccagattgaaaatgctatcgataacatgagctctaagctctataagagtatggagtcagctggtagagctagtgaaatcgtggcggataagttaactgacttaaacactggtgtgggtaaagttaacaaaggacttggtggtttaaactctacacttggcggtacttctaccgcagcagccagggcaagccgtgcaattggtgatacctcaggttcagcacgtggggccacccgtgattttgcagctatggctgatgcaggtggtaaactaccaatgatgtatgcaatgattgcatctaacgtgttcgtagtagccgcagcattccaacagctaaagcttggtgatcagatgaaccgtctgatggagtttggtaccattgttggtgcatctacaggcgttcctgttcagaaccttgctaaagctctgcaagaagctacaggctatgcagtatccttcgaagaagctatgcgccaggcatctgcggcagcagcgtatgggtttacatcagatcagatttctgagttcgctctagttgcacgtcgtgcagcagcggtacttggtgtagatatgactgacgcacttaaccgtgttgtaaaaggtatctccaagcaagaagttgaactaatggatgaattaggtatcaccattcgtctgaacgaagcttatgatgcgtacgttaagcaactgaacatgacaagtaacggtatcaagtacactgcggatagtttatcttcttaccagaaacagcaagcatacgctaatgctgcagttgctcagtcaacgaaactgttcggaaacctggaccacgttcttactgcaactccctgggaaacttttgcaaccaacgcagacaccgcgttgaaaagggtccagatgtccgcagctaagtatctagctcctgtagctaactgggtcaatactatcttctaccaatctaagattgcagggatgttagagcaaggagaggcagcagccgccactaatgctcaaattgatcctaagaataccgcggctatggtagcttcgtaccagaacgcaaagaaagctcttaccgatatggaggacgcgtctaaagggtacaacgtagctatccaggaatctcaggatagaatacgcgctattgataagcagctcagtggtatgaccacggtcaaaactttggcaaacatgctcctccctggtgatttcaaacgagacattcctagagaccagcagaagctcctagatgaaaagctagctctagaagataagatctcacaggccgagcgcgaacgtgctaatactatgcaggctcgagcgcaactccagaataaccttgaagagcgtaccaatgctttactaaaagcacagccacagttggctaaagaagtagcagaaactggtaaaactattgttgaccccactaaagtgaaggtgttaggtgatttaaccagctcaatggcttcattctctaagaacattgctcctgatattaaaacagctatggctgacttgacggataacaagaacttaggtaaggtggtgggtcaactctctgacgttaagaaagagattgagcagcaggcagggattactggcgaatctgtagatgacctggctaagaagtacggcctaggcgtcagcagtatgaaagaactgaatgaccagctaagcacggctaaaacacttcaaactttggtgaacaacgagagtgctaacgaactcgctttacagcagaaaaagaacgatcttctgaaatccggaatggatagtaagaaagtagatgttgctattagtaatatggaagtcggtatgctagacaagcaaatcgctgcatatgaagatatcaaacgtgtcaatggtacttctgcggttcttgagaacaagatcaacgaattgaagaccaagagactaactctactgaacggacaatttggtaaagaagagaaaatcaaggatgttcgtgataaagttgttggtattgagcgggaaattgctctacttaacaaccgtaccatgacggatagtcagtacaacgtggctcgtcttcaaatggaacttgctgttgaaaaagatcgcttcaagatcttagaaggcaacgctaaaaaagaacgtgaacgtgaggagtccagacgtaacatcgctgcaattgaaagagaaatctggaaagagcagttagatcgtaacgctaaaactgccgaaatgcgtaacgaagcctttgagcgtagccagagcacgaaacctctgatgggtgaatcgcaaagaatgcaggagcagttagcgttctaccaggaaatgaaggaattcacgaaaggtaacgccgatgagcaggcacgttggagcaaggagattgccaacactactgcccaaatggcagctctcaaggctcagcgtagtgcacagatgatggatcgcgtaggacagtcgttgggcgcagactatacgcctactacgggtctagagggagatgataagaaattcgccgatatggaaaaccagatggcgtcatacgatacagctatcagtaagctctctcagttgaactcagaagctactgctactgcccaaagtatggggaacttagctaacgctatgatccagttctctcaaggatctctggatactacgtctatgattgcggcaggtatgcagacagttagccagatgatcagctacggtactaaccagcagatttcggcaattgatgcagccatcgcggcagagcagaaacgtgacggtaaatctgagcagtctaagaacaaaatcaagaagatggaagcggagaagattaaacttcagcaggaatctgctaagaagcaaatcattatccagacagcagtagcggtaatgcaggcagcaacagctgtcccgtatccgttctctattcctctgatgatcgcggctggacttgcaggtgctttatctctagcgcaggcatctagtgctactggaatgactgatatagcagggtctggcggcgacaccgactcttacctgactttaggtgagcgccagaagaacgtagacgttagcatgggtgcaagcgcaggtgaattgtcctacgttcgaggtgacaaaggtataggcagtgctaacggattcattcctcgtgcggagggtggtaatacttatcctggagtgtcttataagatgggtgaacatggtacagaagttgcaactcctatggtacctaccaaggtaactccggcggatgaagtagcctctggaacttcttctggcagtactggaagacccgttcagctgaatatccaggcgatggatgctaagagctttatggagtacgcattggaaaaccctgcggcattccaggcagctgtagagttagccttgaatgaacaagggctgagcttaaagaacctgaattaactaaactaaagggaggacgtaattgtcctcccttctttttggaatttataaaattatcttgaaaaattttcttgatatgactataatattaacattgagaggagaaaacaaaacatgagattaccagatccctttacacatcctcagtataacggccttgggtttgataaagctacactgatcgataacgatccagtgatcagagacgagctaccaaacggcaaggttaacgaagttaaaacagccactcagtactggggtcttaacattagttatcctgtgatgtttcccgatgagtatgctgtactttcgtcagcaattttagagtataaacgtactaggggctacctcgacgttatgctcccacattatgagtcttaccgagtaaggggagatgcgaacaactgtcgcattgctgccggacaaaaaggctctacactggttatcaccaatacaggttctctagtaggggaaccaaaaccaggtgatttgttccagttaaccacacatccaaaggtgtacaagattacatcttttaaaaacgtagcaggagtatggacgcttaatctataccctgatctgttgctcactaccaacggctccgagagaccacgtttcaatgggattctcttccaaactaaattaatgaacggagattcattcagcgaagaaatcacagttgatggtgtatacgatggggttaacctagttttgagagaaagtctatgagacagatccttccttctgcgaaagcctaccttgccaacaatgacaagatacgattagcgtatcttgtctctatcgaactcccggggtccacgggtaataatgctgtttacgcttatatgacggactatatgagagatatcaactatggtggtatactcttccaatcagggaaaattaaaacaatcagcagtcacaaacaaaaccgcacgttaaccgtcggtagtttgaacttcagtgttaccggtacggatgccaacgaagtcattaagctagtgcaaagtggcgtatcatttttagatcgttctatttctatatatcaggcgatcatcgacgacaatggggaaatccttccggtggacccagatactaacggcccgttactcttctttaggggtaagattgtaggtggtggtatcaaggaaagcaatacagtatccggagttggtacttctgttataacttggaactgttctaacgaattctacgattttgagagagttgctggacgcttcacagatgacgcctcccaccgcgggcttgagattgtaaatggagaattactaccgtctcacggtgccaaacgaccggaataccaagaagactacggattcttccacgctaacaagagcgttaacttcctagctaaatatcaagtaaaagaagaacgatacaagctagaatctaagaagaaattattcggtctctccaagagctacagccttaaaaagtattatgagactgttactaaagaagtagacctggacttcaaccttgcagccaaatttattcctgtagtatacggtactcaaaaagttcctggtatcccggttttcgcagatacagagagaaacaatccaaacgttgtgtacgtggtttacgcgttctgtgagggtgagattgaaggattcctagacttccagtttggggacgcccccatgatctgtactgatcaaactgacagtacctctcgtacatgctttggacaaaaaagagtgtcgggagatactatggcaagaatttccacagggctcccatcaacatctctctccacgcatggtcaagaatacaagtataatgacggtaacggagatatacgaatctggacattccatggcaagccagaccaaacggtagctacggtactaagagacattgctgctgctaacaatttcttccttcaaggagagaacggtaatggtccggagtactgggactctaggtatagattactggacaccgcgtacgctgttatacgctttactattaccgagaacagaactgatattcctgaagtatccgcagaattaagcggacgtaaagtaaaagtataccaggcagatggttctgttagaacagataaaaccagccaaaatggtgtatggcaaacattcgactacctaacctccactacctttggtgcaagtattcctgtagacagaatggtgattggtgactggagaaaagaggccgatctgttaaatatcatagacacctcatatcaaaccagttggcaaccgttctggagatacgttggatgggagagctggactgctgaaaacagacaaataatgcaaatgaacacgatcttggataactccaactctgtgttcaaaaacgtgcaggaactattagaatccttccagggggcgttaaataacctatcaggtatcttccgcatcaccgtagagaaagattcaaaaactccgctagaacttaatttcctagatacttatggggacctggatctatcagatactacaggccgtaataagtacaactcagttcaggcatctctgattgatcctaccctgaactggaaaaccaactctataacgttctataattctaagtttaagaatgaagatcgtggagttgacaagaaacttcaactttcttttgctaacataaccaactactacactgctagaagcttggcagatagagagcttaagaagtctcgttactctcgctctctgagtttctctttaccttacaaattccttggtatagaacctaacgatcctgtagtattcacctacgatcgttatggctggaataagaagttcttcctagtagatgaggtggagaacacaagggatggtaagataaacgtaactcttcaggagtatggtgaggatgtatttattaactcaacgcaggtagataacagtagcgagagcgtacctgaaatatctaataacgtcctgcctccaagagagtttaaatacacccccaccccagggggagtggtaggggatgttggtaaaaatggagagctttcatggcttcctagcttaacacctaacgtagtctattactcgatacgtaaatcagaccgtgtggatccttatattgtgcagcagaatgcttttacccccagtgttaggatgtatcaggatattgtgggtgaacctgctgggctaacaattttcgagattcgtgctgttgatattaacggtcgtcgcagttctccagtaacaatttcggtagatttgaactcagctaaaaaccttagtatggtagaaaacttccgggtgcttaacctttctcctgaccctgcagaatgggttggacctgacttagagttagggtgggataagctacaggaggaagggctgatttcagggattttctacacacttgaaataagggacaacactaataaactgcttagatccgtgaagatcaccagtttatataactacagttacctgttgggctacaataagctcgactacaaggccaacaactcgaacactttggggatttatagagcacttcagccaagaattcaggcggagggaccaaagggcgagaagtcggttgcatgggcatatatctaaatgatttcaaacatagcaccagctcaaatggtattgcagaatatcgtgaccggttacacgattgcgagtattcagcactcaatcttctccgattacgatgtaattggtagaactttctggctaactacgggtggggtgaccacccgtagggattttaccggcgttgatacattcattgccacaattaacaatttaacctctggtgctgtctactctgcccagggtgccttctatgactcaatggtcgatgaggagttaataaccgctaaagtaggtatgaacctatctagcactgttaactttaaaatgaaaactgctccgaagatcaccaaagtgtcctcttttgcagaatctgtcgacgtgggtgttggtgcccctatggttgtcgtagagctttctggcgaagctgaatacgttaccatcgaaatgaaacctgaaggctctagtacctggactaagtactaccgtggtccaatcactgagcagattatctttggtggtgttccagttggcagatacaacatccgagtatcaggtgttgtcactatgccggacggtgttactgtggacgtttctgggtatgatacctggccgtcactgtttaacctgacctacaacttcacccctccgtcagctccgactaacctgcgtttcaaaactgctcatatccaagatggtatggagcgttttgatgttcgtcttgaatgggactggactcgtggtgcgggtgctaacgttcgtgaattcatcatccagtatattagtaacgatgagtttgcaaaaaccggatggactaaggccaacaaactaaacgtgggtgcagctaaagctggtactatcactagcttcccttacaaaatccgccaccgcttccgtgtactatcggttgcttggggcccagatactcagtctataactaactctaacgaggttacttatattatagacgagagcactactttcgacaacgcattcattaacgagaccggtgtagaaatgacctacgcgggtatcaagggcaaactctggaattctagcaccaaacagtgggagcagactttcttagtagatgctgctactggtgcagtagttcttggtacactcgatgaaaatggtaaagcgccgatttcattcgaccctgttaataagattgtaaacgtcgatggtaaagttattactaaagacattaatgctgctaacgtaattcttactaacctgaccggtaaagacaacccggcaatcttcactcagggtaagaagtacggtaataacgcaggtggtgtctggatgggcgttgacaacgttgacggtaaggccaaatttgacctcggtaataacactcagtatgtgcgctgggatggtgatactcttcgcatttctggtaacgttgtaatcggtactcctggaggtgatgtagaccttgaaaccggtatgcagggtaagcagactgtatttgcttacaaacttggtacatctctgccaagtcgcccgcttgaccaagtttatccaccagctggatggtccgcattcccgcctaaccgcactgctcagaatcagaacgtgtacgttgtgcagggtactctggatcctaagaagagtcctcctgctttagtagacggtaccaactattccgctgcgtctcagtggtctggtgtcccaggtactggcggcactgatggctccaacggggattacactgttcagatttatcagatcaacgctagtaagcccacgaaaccaggtaatatcaatgaccctagtggttggagtcgtaccccaccaactggaacccctctttggatgtgctctggcagattcgatggtaatactaacgcactgaaggtagaaggctggtcagaaccactacgtgtagatggcgagaaaggggctactggtgctacgggtccacaggggccacaaggtcctgctggcggttctgtagaggtacagtggtctaaagacggtactactaactggcatgcaaactttactaccggcgatatttatatgcgtcagcgtgtcggtaccggtgggtggagttcagctatccgtgcagttggggaagacggtactaacggtactccggggtctaaaggtaattacattgggatgcgtttccgtgtggcagctgaaaaacctgatactcctacggggcagaccccttcaggttggtcagatgcaccgcctcagggaaaccctctatggatggttaaggctgagttcaatggacagactaacgctctagtcggcacgtggtcagagccagttcgtattgatggtgaaggtattggagtgaacctgtatccggttaagaaaacactggatcagtggaccggaatgagcaacggtactatggttaagaacccggataccctcagctttactataaccaacacagagagcactacctcctctaccggacctggtgcacatcctgttccgttccaaggttcgcagggccctatagttgagattccagtaaaaccgaatacgtcgtatatcttcacttatgaggttagtactgatagcaccagctttgctttgagagacctattactagagttctctagcattactggaagttttactaatttccaagagttactgactggagctaaaggtaagcaagaggctaagattaccactcgtgctgatactaagttcctgagcttccgtccaggtgtccgcactgccggagcaactgttacctattctaacctaaaacttgaagaaggcattaagtctaccgcttatagcgtagaagcttccgacagtatcggtgaaaaaggggatcaaggtactcagggtccacaagggcctcagggtaatcagggtccacagggtaaccaagggccgcaaggtgctaagggtgataatgcaaaaggattcagcatctcttctcttggccagacgtttacttacgacgcagaaggtaaactgaagtctgatgcaaccatcctgttccaggctttccgtcagaacactacggctaacgtaacgtggtctgctaaggacgagaaaggtggtaacattacactgacaagtactagtaatactggtgctacactgactgccgctaacttcaaaacatcgaagtctgtagtagttacagctgtgtgtgatggtattaccgatcagatcactattgtgcgcctagacgatggttccaacgctcttgtaggtcttctgaccaacgaaggttccacagttctggcgaactatgctgggtacgtgcaaaactacagtactggttctggtgacttcaaagtattctacggggcacgtgagattacctcggaatgtaccttcagtaccatggagaagtacaacctcgatgcagatgttacctcagcaggtaaatatactttaaaaggtatgccagcgggtactgatgttatcaatggttgggtcgatctacgtgctgtacatcctacttacggtgccgtggttcgcagagtggcaactactaaatctatccttgcaaaaggttatgatcgcgttattaccacttcattcgagaacggaaataagggtacctggtctacgggtagtgtccaaggagtttctggtgccacaattgtagccgcaggtttcagtaaggccctagtgatttctgccagagactgtatagaagatgctaacgcattccctgtagtagctggtcagaaatatagactaggcatgtggataatggctagtgagtccaaagtcaatatcaacatggggatgcgaattgtaagggcggccgatggaactgttgactggcagggaaccctcattattgcacaaggtactgtagtacctggtggctggtcttatattgaaaaagagtttactgttggcagttctaataccggtatagcaatgccgtggatccagatggccggatcttctggtagtgatctaggtaaaatatacgttaccgatattcacatttttgctcgggaaatggatggtgctaccggtgcaactggtgctacaggttctcaaggaccacaaggtccacagggtaacaaaggggataaaggtgatactggtgcaactggtgctcaaggccctgctggtaactctgtaaacgtccagtggtctaaggatgggtctactaactggcatgctggtttccaaactggcgacattttcatgcgtcagcaggttaatggggtttggggcggtgctattcgtgcagttggtgaagacggtgctgacggtactgacggtgactacatttcaatgaagtttatcgttcaggataccaaacctggcacacctactggtaacaacccaggtagctggagtgatgcacctccagttggtagccctttatggatgactaagggcactatgaatgctagcggtcaactgcagggtacgtggtctaatccggtccgcctagacgggactatcaaccctaacctgttcgcagttcgtaagtggatggcagggatgactggtacggaagccggcacatctaagaacgatatcgagaagctaacgcataccttgactcgtacttccggaactgataatacggctccagggtgctatgcaactccgtatctcggtagtggggcgttttcccatccagtgactccaggtaaacgctacactctaacctacaatatcgacgcggctagcgaggtccagacccgagatattatattctggcaggctaatccagactcaggacaatctacctacatagaggaactgaataccgggaagtccataaaagttaagcgtacttttgtagttcctgcaggtatgaactacttaatcctacgcccttctgcccttacccttaacgtagcgactacgtggagcatgatcaaactggaagagggcggtgagaagacagagtatcaggtggaatactctgatagcattggtatagtaggtaagtcggttctagttcagtggtctaaggatagctcttccagtaactggcatgataccttccaaacaggtgacttgttcatgcgccagaacgttgacggtgtttggggccctgccatccgtgctatcggtgagaaaggtgaaatcgggcctgacggtaagaaaggtaactacaccaatatcatcttccgtatcgcagaaactaagcccgctaaacccacaggtaataaacctacggactggtttgacgctccacctgatggttctcctctttggatggcaacagcaacgtttaatggggatactaacgctataattggtgcttggtctgaccctgtacgaatcgatgcttccggggtaggtgaaaacttcttagcgttcaaagagtggatgatgtctattcagagggctgaggggactggctcttcggttagcaagaatccggaccagatgagattccgggtaacagctgggccatccagaaatgacgcatacactaccccttaccaaggaaccggcacacattttatagaagtgtcgcctaatactgtgtatactttatcatttgaaatggaaactgctgtgtccactagaatgatgctgttgcagtttgataatggtaatgggggcacgcacgcacgtaacaaccaggttatatcaaccagtactggtaggaacagtctgactattactacgggcgctaacaccacccatctgtctatgcgtatgtcaatctctaacatgggagagactaacgtactgatgaaacctaagctggaactcggggcgttccctacggcatacgtggcgcatcctagtgatctacttggtaaagacggtgctaccggggctactggtcctcaaggtccgcagggtaacactggtgctacaggctctcagggtccgcaaggtaacaaaggggatactggtgctactggtcctcagggtcctcagggtccgaaaggtaacgctggggagaatgctaaaggattcgctctaacgtcagattatcagtcattcgtgtacgatactgtgggtgacattaaatctgccactactattctgttcaaaggactaaaacagaataccactgcagggatcacgtggagtgctgtaaacgacaagggtgccgctgtaaccttgatgaactctggagataaccgtcagctaactgctgcgaacttcggcacttctaagtgggttacggtaacagcaacctgtgacggtttatctgaccagattactgtggttcgtttgcaggatggtgagaacgtactgactgctgttatgacgaatgaagcagctacggtacttgctaactactccggatattgccagagttacgaaaacgccaaaggtcagatgagagtttggtacggaagcaccgatgttactggtcagtgcactttctctgagggcggaagaagtaacgtaactcctagcatcaactccgcaaatgggaattactccgttactggtatgttggatgggaccgatattaccgaaggttgggtggacgttaaggctactcatcctaaatatggggcaattaccaagcgttttgcagtaactaaagtattcctagccaagagctatgagatggttatcaccaataccttcgagaatggtaacaaaggttcatgggcaggagctctgcagagtgtttccggcccaacaaaccagagcatctctaaggcgctgcgtatcacagctagagataacctagagggtaggaacaccatcccagtagcaggggggcaaaaagtccgtatcagattctggtacaacccactaggattagaggaagccatttttagagtaggctttattgttcaccgcaaagatgggggcaaaggttacccctccagaactgtggttacgggccccgctcctaatagctcctgggcgtacttcgatcaagagttgactctaagtgctaacgatgagggtattgcctggccgtggttccagttagataacaaaacttctggttcttcattagggtatatgcttgttgctgacatacacttcgaagatctatccatggatggtgcagacggagctactggtcctcaaggtccacagggtaacactggtgctacaggtcctcaaggtaacaagggggatactggtccacagggtccacaaggtcctgcaggagcttcagttggtgttcagtggtctaagactggtaatgctaacgactggcatacgacatatgtaactggcgacatttatatgcgtcagcaagttaacggtgtgtggtcttctgcgattcgtgcggttggtgaggatggacaggttggtgctgatggtaagtatacttccctgaggttccaagtggctgcaaccaaaccagctagacctacaggtaactctccggctaactggtctgatgcgcctccggatggttctcctctatggatggttaagggtgagtttaactcgaacaaccagcttcagggaacttggtcagatccagttcgtctggacggtgagacggttaaccctaacttataccctgttaaaaagcagttatctgcatggacgggtatgaacaacggtactatatctaagagcccggatagcctatccttcactattactaatactgagtctaccacttctgcgggaccaggggcgcacccaacgcctttccaaggaaaccaaggcccaatattagaactgccggttaagggaaacacagcctacgtattcacgtatacagtgtctacagcagatgctgctatatccacaagagatctgatactggagtttaatagtctgatctctgggtatgcttccctagtggagaagcttgttaacactaaaggtgagcaggagattcgtttcaccaccaagtccgctactaagtttataggtttccgaccaggagtattagctgctggaagcgttgtaacgtattctaagttgaaactagaagagagcatagtagctacgccgtatagtgttgaggcctcagatagtattggggaaaagggggacaccggctcccaaggtccacagggtagtcaaggaccgcagggtagtaaaggtgacaagggggacacaggagctactggaccacaagggccacaaggggctaacggtagtaatgctaaagcctttgctctaacatccgatagcttgtcgtttagcttcgatactagtggtaacctgaaatctaatggtactatcaagatcgatagctggagacagaataccactgctgcaataacctggactgccaagaaccaagcagggagtaatataactttaggtggcactgctactaacaagactataacctctgctcagttcggaagctcagagtacgtaacagtaaccgcgacgtgtgatggaataaccgattccattacaatagttaggctgcaagacggggtgaactctctagtcgggtacttaactaacgaagcggctaacctgtcgtgtaactcctacggttttgtgcagaattgggatggcactacgggtaactttaaggtgttctacgggacggtagatgttaccagtcagtgtaccttcggagtggaggataagagcaatcttaacggcaacatagggtcaagcggttattatgcccctagcgctatgccaaacgggctggaaattacctctgggtgggtagattataaggctacgcatcctaagtacggaacacttattaagaggtttacactcaaaaagagcctgcccgggattggttacgacagagtgttcacggggtcctttgactctggtaacaatggatcgtggggacgtacggtagttgacatcgctacgggcagtcccggaggacacaccaaggctatacagtgcacctctagggacaccatggaaagtagtaactggttccctactcgtaaggggatgcgctaccgtgtaactgcatgggtgaacaactctgagggtgagtatcagctaaggttaggcctccatacccagaactcttctggcagcgttaacactggttacccaactatgctagccgcatcagctaaggattccgagggatggaaactagtaactggtattgtcacggtgggagatgggtctaccgcggagactggtagggcaagaccatttatccagatgaatggtagtgctagccccttcggcaacgcttacgtagctgctatagcgatcgaagacctatctatggatggtgcagatggggcaacagggccgcagggtccacaaggtaatactggtgccactggtccgcaaggtgataaaggggatactggtcctcagggtccacaggggcctgcaggtaactctgtaaacgttcaatggtctaaggatgggtctactaactggcacagtacgttcacttcaggtgatctgtacatgcgtcagcaggtgaatggatcctggggtcctgcgatcagagcagtaggtgagaacggggctaatggtacgccaggttctaagggtaactatgtgagtatgaagttcgccgtaatggctagcactcctagtaggccttctggtagtaatccagctggctggtcagatagccctcctccaggtaacccgttatggatgattaaagcggagtttaatggggagactaatgctattataggtaattggtcagatcctattcgcctagatggggatagtattaacgagaacctgttctactttaaagcctggttagactcgattaccggagttgcaggcaacggttcatctataggtaagaactacgagttactaagggctaggataatcgcaggtacaggagttaccgatgcgtataccctcccatcagatggatccgcctccatgttcacctaccttcctccaagcaccacatatacgatgtctttcgagactgataacgctgtagaagttcgttgtcacgtattttggtacgctaagggaagcaataccactggaggagtgctgaagactattgcatctactactgcaggtttgagcagctttaccttcaccacgccggctaattcggataggatatccgttaggttctcagttaacgaatctgggggaaataacgttgtaggaaggtgtaagattgaaaagggagccttcgtaacgtcatatgttcgtaaccagtatgacgctgtaggggatcgtggtccagggttctatactcaggcgatcacaaacttaaccggatggaacgatactcaggcagcatctttcttccagtcaacatttggtggacctccggttaagtatgacgtactaactcagtataagtcgggctctccgcagaactcctggactcgtcaatggaatggctcggcatggacagcccctgcattaactgttcatggtgatatgatcgtctccggttctatcactgctgataagattattgcaaacaacgcgttcctggcgcagattggtgttgacatcctttacaatagggccgccgcactaagctctaacccagagggcacttacacaatgaaaatagacctggctaacgggtacattcatataaggtaacaaatgagcacggaaaacagagtagttgatattatccttgatcaaaacgtgtcatacggattgatgctacagttcatggatatcgatgactctgcgtacccagcaacggaaacccctgtcaatctgacaggggtaacccttaagtcttcaattaaagactctctggaatccactggggtaaaattagcagatttcgtcgtaacagtagtaaacgctacacaaggtcaggcgtcgctaggattaactgcggctaccgtggcaacaatcgttagtaaagcaagtaaagaacgagataaatataatcctagacttcggttcgcaggttactatgatgtaatcatgaccaaaggaacaggagctaccgctacctcttatagagtcatggaggggagcgtgtacgtcagtgatggagtaaccgcgtaatggctattacaacaagaattattgcacaacaggttaccgctcttgacggagctaactcaagggtaagtaagtacccaaaatttaccgtacagctaggatactcagttagttctctggctgctacagaattactagatgctgccactagatcggcagcatccgccgccgccgctaaaacttcggaaaccaatgctaaggcttctgaaaccgctagtaaaaattcccagacagcagctaagacttcagaaactaacgcggcagcatccgcccaagtagctcagaatttggcaggtaaagcgtccctagtaacaccactaggagtgatgaccggctcggcagaagctaagattgcatctataacaatagccgcaaatcagtcttctagcgttcacgtattatttgcgctctacgctacaggtaatggagccaacagggatgatatatacaatatggagatagtatccctggcattacctggtcctgtaacctctgtaaccgcggacaacatcggcagcttccttagtcatcgagtaataggtccggccaacactaatggatttatggtaggacttaaatctactattgagggtagcaacgtgacctatgatgtatacctcaaatctcgtagtagtttcagagaccctaagatggcattcttatccggctccatatctgttactccacctaccggacctttggtggacggaacatcccctgcgtggaaaactacaggttttgatactgatgttatctatgtaaatagggcgcaagtaattgatgatggcattagtttagcccgcatcaaacaactagctataactaacggtaaaaccgatagctctatacttcttttatcctatttaaatgaaacaggtatactatctaccaataagaagtctatttccctccggccaggaggtacgagtgactctagtattgcagctacggagtttctacctaacgggaatataattctgcctaatggggatactgggaaccaaactattagttggttaggtgggccccgcatacgagtcaactccaacgggtcttttgttctttctactaataatcccagtaatcaaactagtgggtttataactttcaggccacaaggtgatcaagtaacttccactgagcttcagattagggatgatggtaacattaagcagacagctccacagtcatcggcaggcaatgcacttatacgccaggatgcggctattcaacatatcatggataaggctccggctgccggtattactgctaaccccctaagcgacttgaacgtaatacctacgcctgaaggtacagatccttggggagcagacggtgtacgtgtattccaatcaggggtatcaacaaaaaatactccggacggaactactggtcggcttggaactatcctcaacgttaggcacacccagtaccgtataatgcagttcttcatgcagagtaatgctactgcacctattctgcatattagatcattaagggctgatcagggtaataccccaccggcatggtttaaagtttatacagaatactctaaacctaacattcagtctgacatagcaggtattactatagacggcaatggtttcgttaagaaagcctccccgatcgccaagctcatagccgaaattcctagcaaagaggattcattcttctggacaggcgtggaaactgtgggaggttacgtagggtgtaacgcagaggctcaaggtgtatttgctgtaaaaactggactaggcaagtatactattaaagggagtttaggctggaacacggaaggatggaaatttgagctaccaagagatgataacggcaatatgttgtgcttcgtggaatcggattggaatgaggaagagaaagagctaaacatacaggtgttcacccgtaagtttgatattaacacaggtaatatcatcgctggtgaacctatggagataccacaaggtcgttggattgatctacgtctggaaatgccaaaagtggaaataccagaagtggaatttccagaagatccagaagtataataaaataaaaccccagtcggagcaatccgactggggtttttctatttacatcttaccagaacttccgaagccaccttctccacgatcagtgtcggtcagactatcgacaatttcaatgtcattgggattataatgaggtacgatcaccaactgacacagacgctcaaagttatcaatcggttgtgtctcgttgctcatattcaacaggttcatcttgatggttcctcgataatctgagtcaatcacccctgttgtattggcaatcattagccgacgtttccctagagaacttctcggaaccacgattcctacccagccttcgggaatctcaaccgcaactccggtatcaatcatcaatgactccccaggaggtatggcacgcaataggtcggaagcacgatctccgaagtaggcccgtagatccataccggctgcttccgagcttccaacgtgaggtttacaatcggggtgagataatttaatacgcattatacttctcctgtggcaatagccgtaatgtctttaacaaattgatcgtagatatcttgtcctgctgcggcaactgcttccccacagaaacttgggagatctactagagttaggttacgttccataagttcgcctgatttattcagagcctggacgaatttttgagttcctgggagcggtagtgcatcaataatgtctagcacgctaccatgttcccggattaggttgtagccacgtttttcgccgataccttcaacaccacgaatgttatcccccatatcgcccataatggcttttaatgagataaactgatctacagtatctacgttatggttgtcgaacatatctttctcgtgatattctttacgagtagtaaacgagaagcgggagatattcggagcaagcagggtatcccagtcaccgtctgtggagatgagccagatatgatcgtagtgatgacctatcagctgaataatgaaagccgccatgtcatctgcttctactccgcggattcggaaagtagggaattggcttgcaataagatcaaacgcatcgtctaagtattcaaagaattgacgatccgcctctacttccgcttcggagcgatcggcgtacttagcgtctcggttgcccttatactccgggaaaatattggtacggaagatactcttccctttatcccctagaacgatagtgtgcttcgcatcgtaggagtttgccaaagagttgatggtgtttgcaaaggatgctgcaataggcttaccactatctttcttgaagcggaagcctaagttcgtaccgtcaacaatcataagattacggcgtgaggcgaggcgttgttctgcctctcgtttcattgttccccaggatttactcatttaactaaatctccaatatcacatgcgtttaaccacggctcaaaaagaccgataacaatttccattccacgtttattaactatgaaatgtgctctactcatgaggttatcaatcatagggtcgctactatcaagagcgataagccattgaccacgatctttcttaaagatcagggcgggtttcatgttcatttgctcaccttcacgtgcggcttgggcccaccatttttctagctgggattctccaacgtttaggatattgctattaaatttttcgtctgcgtagtgtttgatctcaaaacagtattggctcatcttacctacactaggaggtagatacacatcacccttcagggagtgggattgaccaaaagctcctgaaccaggaacacgttcccagtccaaggaggtatacttacgcaacatatcacggatttggtactccgctcgttttcctttctcgcgactgtctacggccattaggcctccaaaattgataagccagcttcgtcttgtttaacctcaatcttatgtgcatacggatgtgtgtgcccgtgagatacgatgattgagttcagctgatcttcttcctgtagaagttctacgagggtattaattccatccgggtcaatataacttacaacttcatcaaggaagagcaggttgatattaactttactaatcgttgaaagcaacattcgaattgctaatagcgtggaaatattgatacggctctgctgaccagtggagcagttgaccatagaagtcctgttaccatcattgtagatgacaacctgtagcttcgtctcgtctaactcgaaccctagagcaaatttaccgctggtcatgatagagagataatgattgatcatctcttcaaataccttgacactatgctccagcttataccctaccagatctttcagcccggtaattaagatatctagatccgctacttcttctgcaactaaggacagttcagcctggatcttatcaaactcctgctcggccttttgaatctgttcacgcttagcttcatatttcgcattttcacgtacaactgattcgttatgggttcttgcaagttctaccgaggatctgccttgacgaatgctagactcaatagctttgatacgctcagctaacccgctagcgtctacgatttcatcctgcgttccattgacttcatcaaattccttgaggtttttgcgagcctgttccagagcgttaaacttagagatataatccttaaacgccctatcttccttcctaagttcttcaacttctgcttccagcttttgacgttctttatagagcggatcatactcctccttagttcgtctcatagcttcttgggcggcggaggtatctaagtgagttccgcacgcagaacactgagttttacctgctgcatttttgaaatcgtagtaacgtttcttcagatcatccgctctagttgccacgaccgttaggttacgcgtaacactcaggagttcctcagatttcgaggtgggcgcgggtaaattttcaaatggtgcaaaagttttttcggcagcttgtacggccatgtccaaagagctacgttttgcaatactggctttttgcttctgagccagtgctaccttgacttttgcttcggttaattcttcgactagtggctcttcatcgaaaacagggattgggatctctgattgaggtgtgccaagcgaggcttttgaggaaagtatagattgggcagttcgcaggctaccttccaatccggacagttttgccgagacggctttacgtcccactttaacacgttcggaaacttccttatattgttcctgatcaaacaggttaacgaggaaagccttgcgctgagcatccgtagtcttgaggaagtcgagactggatccaactgactgatatacgagcttagtaaatgtcgtaaaatcacaggcgagtacctcttctatcagcttatacgtttgggttgcagtatgaccactgatatcttcaccgtttttagtgagagttactttggcggttgacttcacaactttcttgacgttgtacacgtcaccgtcttttgtgaactgaccttctagcgtataggacttggagccagtatgccagttaaacaggtcgtccttcttgataccgcgtgagttcttattataaagaagctcttctagagctgtaccaattgttgatttacccagcccattacgcccgattaactgagttacgcggtgattatcaaactcgatcaccacgttctcagcatacgacataaaatggctgattgtcaatttattaattactatcgacatactcagcggctctctttaatatgcgagttctagacgcttcgtctagtttctgcacgtttgtgaaataagtatccagctcctgtagcagtgacatatcgtcaagatctaacttagcatctttggtgacgcggttattgatcttcttatccaacagttcgctgttctttaacgttttgagttgtgatacgtcgccggtgacttcgtatataactctgtcgtacgcatcggcttccattggctcgccgacttcaatagtttttcgtatgagctgtggaagatctcccagttcaacccacgaaaggtagtgctcatggtctcttggcaagaccgtatcgatgataaaagctccgttagttcctttcgtcctttctctgtgaaacgaagttgtaagcggagatccgggatagagcaggtcaacgtccccgatcttttggctgttcttgtagctgtggagatcgcctgcaaatactttggagtacccatgttcgacgaatctttcaaggtcgatttctggtacgacgtgaggcgggattgcacctctgacatgcgtgaagcaaatgtctgaaactctgggcttccaactagctttgtgaaggctgctgtaagggatgatatcgaactctggagatcggtagtctttgacgactttccaaagcccgtctgttgcgtcgctaattgctgctgcatagtgatccaggcaagaaatcgttttagatttcatttcgtggttcccggtgtagataataccaggatgttggagggtagctaggaatgcaaacagtagttcaacttcttctgaagacgggtctgaaacatccatgatgtcacccccaataatgtgaaggtcacacccagtagctccaaacacttcgtccagcttttcaccgagaaggataaaccgatttttctgccattcctgaggaacgttcttcgctcctagcttgatgtgatgatctgctgagaaaagtattttcatagtcaaaataaaagggagccgaagctccccttgtttggattaatcgaggtcagaagctgcttcgtgatcgatgttaccggagttcgcggaaccttcattacctttagattcatcgccctcctcatctttcttaccttccagccatgcctggattgctttcttctgctcatcataggacggaaccgggtaggtaacatccagtttaggcactttttcgaagccttcgaattcgtccgcttcgttatacagagcctcgccaatcagagcaacgtcggcttcatgcagggcggcctctttagaacccggctgatttttagccatctggaactgcattgcagcgatctgctgtacatcgtacttagtatcgaaaccagtaccagatttggagatagtgatatcgatctcacccggatcttccagattcagctgggccatgatggagtggataccggtcaggatggttgccttaacttccatcagcttcagtttgttatcagtacgatcgataacaacggccaggtagtttttcttaggacgcagcggctgagccttaccatctttcttctccggatctttgaagcccatgtcgtgaaccggatcggatgctccacggatgaaacgctctttctcacggtcgaaacgcaggcactcgaacggagccggtttaccttctttgttctgaatccagtacacataacgcgggagaacgccggaaacgatacgcacaacgttcttaccgttgttgaacttcatgtagtccagtttgtcgccgttagaaccgccagtagtagaaccccaagatttagtagccatatttatttttcctcgataaatgtcaattttgacttgttgattgcgattagtgggtggtgctcgataactgctctaggaacccacggcggaatatattgcatatccagtgatgtatccttagagaagctatattcggcatagtttctaaaactcaaaagtcctagatactcagccaactgtcggtctgacagctttcgtttattataaacgattgtatcttcgttcaagataaatgatctacccgttaacatcacatgagcttcgggatcttcaaccattcgtctgataatctgtacaatcagcgatgagttacctctcgctaatatgtaaattttttcgtaatcataaaacaacatgattattatacaccattttgagagaatttagcaactaagttttttatttttctgcttcggactttccgaagattcagttgctgttcccattaatttatacagatattatatcgtatttttgaggactcagcaactgaaatttttaactatttgcttaactcttctttgtaaatctgtctctcaattcaatataaatattatatcaaactttggggttcttagcaaacagaattttatctaagtttaccatgttcttctcgttaaagtcaagaacttcccacccattgagacgatataccgcttctctacctgccgcctgcttgaatcctacacctcctagcttcagatccacgaggattgggtccaacttatcatctgccatacgttggacacgacctgccaactgttcgattagagattcattatttattaaagagcctaacactaaacacgataaagcatttaatgacacaccctccgagaagatgctttgggaagccgctaatacacatgggccgtcattggttacgtcaatctgtacctgctccctatcatcgagcgaagttacaccggtaatcgtgtaggtcttcacacccctgagttccaaagcattcgtaactctctctatcagatctatacgatcggacacaaacaggactttatgacctgccatcgaatataactcgcacaagtcaacaacctgttgaaagtactctggctgcgaatacacatcgttagctcttatcgcccacggcacattcatatttccagaaacctgcgttttcagcgcaaacctatggatagtaggcggcagagtgttatttaccggaggactgtatactttcgttccaaaatagtccttaaacataacctgtaacccatccttacgttttaacgtaccggatagcccgattttatatcgtgccgaggactgctctagaaacttggtgaacgtggtggcaacacagtgatgcacttcgtcaacaataacggtgccgaactcttttgccaaagcggctccgtgtttgttaactgtctgtatattactaataacgataggagaatcgatattaaatttgccggacccaataactcctggctcaatcccgaagaacttgcgtacctccttctcccacatagctcgaatggtagtgttggtacatataactaacgttttttgcccaagtttatgggcgatagcaagagcgaggattgttttaccgaacccaggcttaccattaataatgcacgtatcgttacagtcttcatatatagggagctgatcccctggtctcagggtaaacgatggctttggaatatccacaggaactagagtacgtttatccacgacctctgtcactttttgcccgaaagattctagaagatctaatctggttacggggaaccacttgatttctttacctactgatcctgagttctggaacattagaggatacttcgccccaggtttaaagatctggtatgaagtgtgttttaataagtattcccacagttcgttgctgggtttacaatagattttattagatataactatcttcatatcttaactctaagtctaggagtttctggctcctcttcgtgcgtatcaaaaataacgggtgaaccgcgaaccaatgcgtacgaaatatagttggcaggttcactaagtaagaaaggatatggaacgttcttgacataacactggtactttccgttgaagattctagttgatcctctaacgcgttccgtgataatgttgtaataagttgtaggtttccatgttactatcttacctgtggagtcgatgaaatgctttagtccagaatttattatttgagataagtacttgaactgtttctttaatgggtagagcttgtaaggtaaattttcccgctcaccataaagaaaaagccttcgctgagagaatgtcccaggaaggcttggattgtccagcacataccttgtaaatctcgtctggataacaatgtactccccctcttggaagagtacatcataagcccttaaagcatatactggtaagctaaagttaagcaccaagaaccctgcgaacgttgacaatatctttgctgatttccggcaagaacttaatattggcgtacttatcgtgatcagggtggttttcatcgttagccgcaatagcagcgtaatcgaagtcctccataccgataatactacgtactttctcctcaaactccttgtcctcaatgcaagcaacagaaggacgctgtttcttgattttaccacaggagtaatcacgagaaccgccagcttctgagtcagagtcgataccaatcggacagcctgggatactgataccacggtctacctgaatgttacggattagcatctcgttatactgatcaactaaatcctcacgaacaatggcaaccacggagtcgtgaaccagcatgatgatcttcatttcgtcctgcagacccagagagcgaatctcattatcggtatcaatagcgcctagcaggagactatcagaagatgcagactgaatgatggcgttgaagccagaacgcagttcttcaccctgtacaccacggtcttcggagttaatgttgtgcagacgacgcttacgaccaaagtggctataaatgaagccgttagtctggatttgggagtgagatttatcgatccatttcttaagctgagggaatcggccaaagtaggtttcgatgtactctttcgcatctccagtggtacattcagtgtacggtttaccggtcttcatgtgctcttctaggagagcttcgtttactgacgctgctactttagctgggccagaaccataaagaataccgaacgaaatcgcttttgcagcctgacgcagtgcaggatacagctttttaacttcagtaggtttacatggcagagcaaataccatgtgtgcaattgaaccgtggaagtccgagtagttttccgggtcgttctgcatgttgataaacacttgctgcatgttaatgtcaccagacagtacagcggcatagtagatctcagcagttgttaagtcccatgcgataatgcgataaccgataggggcaacaatacaacctttaataacagactcatcacgaggtaactgttgaaggttcagcttaccagacgaactcagacgaccggatgtagtcatatggatatggaatccagtacgaatgcaaccgtcagcatcgatactgatcagcatcttctcgatatacgtcgagagcagcttggagatcttacgaatctctagcagagtcttagctatcggatgttggtctgaaagttctttcagggcatctgcgccagtggaatctgcacccgtatctgtcatgataccagtcggggttagcccaacataatcgaacaggagcttacggagctggacaacagaggctgcgttaaacaccgagccttgatcttcctctagcttacgaacctctggatactcatacagtttagcctttgcaagctgtagcgcagtcattaactgaacctgagcctctttcagacgatctttggagatcggtacaccacgatcttccatgcgctgtaggaatacgcatcccggcatcagtacatcgtagtacagagacttcagtcgagggttagcttcaacttttggcaggaagaagttggatagacgcagtgttgcatcggtatcttttgctgcgtaaggccacatgatatcaaacggaatgagatcatacgagaaatcctctttcttgatcttatgcgtcttgcaatacgtttccttgaactggtcgagttcaaaatcgtagtcccccatgtcagtatacttcatcgccaaagatttcaaaccgtgtgtaccacgtcgttcgtctagggcgtagtgcatcagcatggtatcatgaaggcgtttctcttccgctgccttatcaaaggataagcctaagtgatagcagtagaagtgcatatcaaacttcaagttatggaacacaacaccatgttccgggctgtcgaacagtttctgtaagtaatagacggtgttttcagtgatgacgtctgcgtcaatatacacgccctgatactcttggtgggagattgagatccccagcatgtaaccatctcggcagtacagcgcactggtttcggagtcatatgcaatcatgccagggcacatggtatacaccatcttcacatacgcttcggcttcatccgggcactgaatcgggcggtaatcacctgctttagagcgtttttcacgaccattgagaatggcatgaatgctctctactgtggcttcaaatacaggcttcatttccggcttaaagtggagctgggccggactgatacttgcaatccagttagcgtacccatcgtgctcaacacgtttacctgagtaatcggaaatgcctttcttagctgcaaacttcaggaacgggtctgcacctaccagaataacgtaatcaaaatcttccggattgaacgggttctccggtgttccgatagtgatatgtttcttgagcagtcgcccggttactttctcactagccataaagaaggtctcaacttcatggtcaaagagttcgaagtgcttctgatagcggacgttattcggtgatttgtctacaactgcaattttcattgatttctcctattaggtaagcaagtaaaacgtcagtgtttcttctcaaacttacccaattattatatcaaatcttgacatgttcggcaatcaagatttctacgtttctgatgagctggtcgacttcttcagcatctaggtctccagggtctttgccctctggaagcaggaagttacctataattggtataattctagtcttatcacggattagtttggccaatttcttagctgcctcgttgccggacttatcattgtccaatacgatgactacgtgagtcgtacctgcgatttggaacggcatgaatttatctgcaatgttatctagagagaactggtgtgtaccaaaacaacaggaaacgttatggcaacctttatcttctagattcaacatgtcgaatataccttcgactaggattagggctggggtattatagcgaacagggaagattggtggggagaccttcttgggtctaatcatatatttcggaggggcagagctatccatattacggcctaagaagaataagtttctccctacggcatccgtaataggaaacactacacgaccttcccagtcctctgtttgttggaatgcaaagtactttttgaaagtctctgctttgataccacgaaaatcctggtcgaatatcatggctgattctggaatttctagactgcgaccctcagttcggaggtcactaatcattctgcgaactttcaggagtctaggagacgtcctgtactgttcttcattgaagtaatgaaagatgcttggtataccacgaccaaatccgcagcttaggcagtgaaaaaccccggaatcggggtcaacacgtaaacttggatgtgcatcctcatggtcaggattgagacagcggatgaggatgtccccacccgtatctctgtattcaatccctttgagatctaaaagctcggttattctactcataagtctcttgaggattctccggtgggattagtatcctcatccgaagcctttttcctttttggtttgtctttcggtttatcgctttcaagtgggataacaaactctgcttccatctgacgaatgtcctctagtttaagatcagaagtctgatccatacgcaatgagttccagttgatcttcggcatgaatgtcataccctcggagttacgagtttttacgaagtcaaacttgattgcaccgtcatgcccctcgttctgtttagcggcatttaggtttgcagccatatcacaggaatcgagaatacctcttgccatacgggcgttaccctgttggtcaatctggtaaggagctacaccagcgacgttatgcttttggcacgtagacttgaacgtagaggagacaaccatctgctgcttccagtcatacatatctagtgtcttcgtatcaggcaaacgtacctggttgatatagtctagcagggcgattgttaccttgtccccatacttggaggttaacttagtcagttcaacatcaatggttgctgtactaagctccggatcatacacgatgatcataggagtgtgcaggggtctttcctgcattaacatagtctccatatcgtggaagtcactcatctcgttgagtgtataacgtgatacaaaatcgttatatacttccagaccgccttcgaacatttttgcacgagtcttcgcaagtttgttgagttcaataccttgtaaggagtcattacgcatagctttagctgaaacacctgccataatggctaagttacgtctaaagacctcattctctggcatttcgatggagaaatatggggcgatatccccgttgtaatactgggctacttgaatgttagaacagatgattgatttacctgtaccacgccatccaccgagtagcagtgtttcttttctggcaattccgccaagttgagcatcaaattcgtttgagatgccgagagagataagatttaacatggagtcttcttttctcttgaaaacacgcatagtatcggcgttgaagaccttaccagtcgttgttactcgttcctctagcttcatgtgcagagccgctactcgatcaagtaattctccctgatccagtatggtaatatcctgcaacacatcagtttctagcagattcaggaatagatcctgtgtgtattccgactctaggacatgaatcgcatgcgatatgtcaacgtctggaatctgagtgtttgctaaaacagttagtgcttgagacaaccttgcgtttctgttagactctagcatcagagcatctaacgaaggcattccgttatgctttttgtaataattctggacagcttggtagatcgcggtaaatgcgtcattgaagtgatctttgcgcagtctagagaatgtctctagagccacctgcttttgatcggaggctaggagcattttcaaaactactgcttggacgttatacataagatactctctacgccgcgttagcgtctacttaaacgaaaaaggggagaggaacaaaattcctctcccctcaggtcaaatcaattacttggcggatttagcgtcaagtttagcgcgcttagcaacaccatcgtgatctttagcggagataccacggcggctcagcatagacttaacaccacgctcggatttaccagttgcttctgcgatctcagcaacggtcatatcggcgatattcagaccttccagaacgtcttcacgtgccttagcattggagacttcctgaaccggcatagcttcgatacggccttcacgcagcaggctcagagctttaccacggatctgcttaacggtacgttcgaactgagcagcgattgcttcaacggacgcgccactggcaacggcgttaatgaaagcagcttcctgatccgggctaaagctacgtacagcagcggccttttcagtcggcttaacagcggcagtcagttccaggctcaggattttaccctgtacttgtttagcggtataagcaccaccaactacagcagcagcgatttcagcgtaggtatactgacccggatggtcgttcaggaatgcaaccagttcatcttcctgacccggagtccacggagatttggttacgtcggatgctttctgcacttcgaagccttctttacgcagtttagaaccaaccgaacgggcggtaacttctttaccagtttcagcagccagttcagcagcgatgttagcaacagcttcctgagagataacggtcgcgttcagggcgttagctttagcggtcagggatgcagtgatttcttcgttccaggttaatttagccatttttatttattctccagtagaattttaatcgtcaagacttcgatgcccagcgattgtgcttttttgtatgaagaagaaccgatcttggtttcatcttcgcagattaagtagtttacagccttagtcacggaggttttcaccgtatacccaagactttccagatatttggtagcgtccgcacgatttttgaagtcgttgagcttaccagtaatgcaaagaacaactccgttggattcagtcgccggggtaacttgagtttcccgcgccccactgaatttccatggtagattaattacgtcctgtcctgccggtgtattcttccacgaagctaagttttctccagctttaccttccgctttcacagattggaaatcgttgtaaagctgggatagtttcttagcagcaacttcaccgataagagggatactaagagatccaagaaccgaaccaaagtcaacatcttgtctcagcttagtttccaactctagctcaagtttcgtggcgactttatcacctacagctctgactaaatcttctttagtcaggaaaaagagttctgaaactttcgtgatttccagtttagcaatcgtctgtgggccaaagccctttaacttcatctttgagcagaagttctcgattaatttactgctttgagctggacacatagacttgttacggcagaacaactgatcgttaactaagtccagtttcgaaccacaagaggggcaattcagtggaatttcaattttcattgattttcttcctcatcaatttatataaatattatagcaagaaaatcaggactaggcaatcgaaatttttcagaatttagctcagtctctcaccaaatatttctttccctcaactgaatgataatagtatacaccctggcgatgaaaatgtcaataactactttaaaaaatcatcacggtgtatctattgaatcaagtgttactcgtaaacgcgttctacgatgcgagggataaccccaccactacgaattacacgaatctggcaaccgatttctaggtcaagggcagtgatatagccaacgttattcagggtagcttttgagatgacagcgtcgtcgatgactaccggggtgaagtatccaacaggagtgaccttaccggaagccccaacttgccattctacccgttctagcgtagtaacctcgccttcatcgtcttctttgatggcgtacgcaccacgagggaacttgttagtccaacctgctgcgttaaactgattgttgccatccatacgaaccaccacgccgtccgttgggaaccagtctactcggctggagatatccagacaggtaacaaaaccatcaccctgaaggatatgcatatccccacagaaagtagcggtcaggccaactttgccggtctcacactggatactatatgccgtgaacatcaggccaccttccgcaatacgggagagaaactctccagaatccttcaggttaatagcaccagaggcgaagttgcgcatgttctcaacttccttggtgatatgtacttcaccagtaatctgcaccggggtcttttgagagatccgcttagggatgttcagcaacttcacgttatgagttacatcgttccccaggataccgttaccacgagttaacgcagaaacgaacttcccaccgatatacagcagtgaaatagcacagccatcgagcttcggcgtttcaatgccctggaagggcacttcttcgccgcggcctgggtacactttctgtagggagaacatacggaacaggtgaggtacatcacctttagggccgatttcttcctctagcgggaaacgacggattaaggcatcatactcttcatcggagataatcgacatgcctttgtagtacgcgtcttggcacagcttgataaattctttaacgtgttgcattatttggcctcgtagtgttcgcacagcttcttggtctttccttcccaattgaaatctcggcaaagataatagaaaagtgttatcacgtttcgttcagacttagggctgtatagttcgcagctcaactcagtaccttcgtaccacatgtttaggagcttatacccttcgagagtatgaactacatttttgcccttctctttttcaatccatgttaggattaactcttggcccttaattggtgggcggtaatacgcatcgacagttatctttttcatggcgtagcgcctcattaataattctagacatgtgtgctctcagttgctgggtatgagcatacgtcttagcagcttcggttagcttattaaccaattgagcaatttcatgatctttcataaagatatccttcaaactatgggaatattatatcaaggtttaaaacactaagcaattacttttttctagcaaactccccatgatgttcttttctgaacaaatcaagtgcttcttccgctgaggatatagagtcaaagtaccctacgtgttttcgtgtgccattgacagagcatcgagccatccatttatttttggaggagttccacgttacgccctttaccccgctagtgttattgctagccagttttgcattctggccattttgggagtacgtggctttcctcagattctcatgaaagttgttccacgtcactccgtctttatggtctactatttctggccactcgttattatggaggaaaaagataattctgtgcacttggtatgctatgccctttacatgtgctcgaatgtaccccttgctgtccatagacgcacactccttaccagacattctagcgtcgtatgcagggtcttctcccagtgcattgtagtacagtttaccttctgcttctacgtaggtgaaatggcgaaggatctcatccctcgtcagagttttgggagtgtttgtacacttcatgtaatacctcagacttgcttaaaatcttcgtaaaggcttgaaacatagatgaggtggtttctagcgtatacggaaaggaaaaaccggattttgttggaaaccaattatctaggatatccaatagccagagtctaaatcctagatataaattaccacgatactcggataccgtcatacggatttgtctacctggatcttcaaatactacaatggattgttcctccgaatgtccttcgtaatcctgacaaatgttttgattcatttttattgttctcagataaacaaaaagcccccgaaggggctagttgcgtcttaacgacctactggagtagctcgatcaagttcttggttgaggctggtaatacgtttgatgcttgcgataggcatatagcggaacttgtcgctagaacggctgaagaccagaatatgatctttgtctgccggggccaatttttcgcggactaaacgctccgccagatatttgtcctgtgcaggatcgaactcagtcgtaccgtagaggtaagttacccccttggtacgcagtttggtgtattgcatgcaaaactcaccgtgtttctcacagatagctacgacttgtgctttattcattgcaataccctcttatttagtgattttacggatagcttcagccaggtgagaggcagctttaccggtcagtttgtcaacgatcgattcgtccaggaagccatcttccagtccagcgtcgttaaatgcagcgcgcagttcagcctgagcatcagacttagaagtacggccaccagctttaggagcatcaccaccagttttagcggtagacttaccggcttctttcttgacgtatacgccagctttggacagcttcatacgaaggccgttcggggaaacaccgtgctctttagcaatctcagctacgatctccatggaaacgccaggacgttcatcttccgggaagagttcgattttggcgacgtaggcagaagtcagttcagcttcgagttcaggagaccattgagttggagtagacatatttattacttccttatttattgttaaaaagagtttttaagttttgtttcaaactatgagaatattataacaagttacttagcgattagcaactacaatttttgaatagttgggtatgacctcacgtcttcgaagctctagaagttcgtgtgcttcctccggagtattaacccgtgaggtcacgtaacgtttaccttcataagtgaatctgccacgccacttttggcgatccttctcaaataccacacccttgtacccagaggtattagttactggggtggcagagttcaatgcgttgtgtgaggcagaaatttcccgtagatttccagggctattgtttaacttattcccatcttcgtgatctatgcgatcaggtacgaaacctttgtctatcatgaatactacttggtgaaccccaaccagtagtcgaggatcgttaaagcgtattcgtaggtccacttgtaagtatccacccgaatctttcgatccggctaactgaccagtatttttacctactttccagcgtataccgccatctgataactcaaaaagttttgaacaaacctcttgagttagaatatcccatttactcatttttaccgcgtttctctaacttcagagcagccttaacagcattattaactaattcggctacatcttctttgccccatttaaaccctagcgacttgatatccactcccagggaaacaagatgctctacagaagctatatcccaatacatgtagttaacatactgctgtttggattcagacagcaagtaaatacggtaagctcctaccgggttatcaagagctttcttaatttcaccaatacactggtaccctgggatccaaacgtgttcgcctacttcaaatacctctttcattgattcttctggaatcgctggcgggaagagtgggtcaacctcaccattaacacgaagcagagcaccgtgggcagacagaaccattcggatcatgttagcggaacggtagaaacgctcggcgattgcctcaaaactatcaccggacagatacgaatcgataacgttggccagctcagccccttcgattttagtaccacgtttctttttacgcatttcagcagaaacacgctggttatctttccattcctcgatcaaacgctccatcgtggagttggatgctactccgaggatttcgcaagcgcctttcttggtcttgccaccttctagccactgaatcgcttccttaaacttttcgtccgggatgctattcgcatgaagttttttgcggattgccatgttctttatcctctctcgaatttatgaaactattataatacagatttagcttctaagcaatcgcgattttcatagaacgtagggtcgaaagtaacgtgcatgaattcagatagactcttgtaccccatgtttagttccatgttgatgcgtatagaaaggcgtgtctttcgctgagcttctagccagtcataaatacttggcatctgtgctaaacgaatgggtattaccctacacaactctatctctttggctttccgtgctttcgtatcacgtttgggaaacttccttgtctcccagcgggcatcacgcttgctcattacgtactccaagttcattttgcgcctcatcggccagcgccttctcctcatccgtcataaactcatacggtacagagataccctcgatagagcagtaagttcgataccagtctacgagctgctccgtctccatttccttattaatacccatttgggttaggtacatacgggcatatttagggttggcagactgtcccgtcctaataaagaagtccttcttgtgtttcttcagggcttcaataaaggggctaatcgtcacgttagaacacttcttaatatccttccagaatatatcttgaagtttatggaagaactccgcccgtttgtgtggtttcttactaatccacatctccgcatgttcctgtgtgatactcttgatagagtccaggtggaaatacttgaccagcattagcttggcttcgtatgcgtccgcatgacggggtgcacaccaatctggagtactgctcaaaatagcggaaactcgctcggcagtatactctgcggctgagctatcaatcttaccccagctttcactgaagatatcgatagttgctccctgatccagcagataatatcgcaatgtgctgataaagttacgggactctagctcacgacgttttacatagagctgctgggctaattctagccaaccctcatcgatgttatactgctccgaacccgcagagaatccgctggtggacttatcgatgaaatagaagatattcttagctcctcggtcgcgcctgattgcctggaagcgcatgttcggcgcctggttagctgtacgagtaataacaaatacgttgtcgaaatagttaaagtcaacgccactcgttactgacgggctgcacagtaggcaatcaatctgctgttcaattagctcattcgttgtataatctaaaatacgacgaatatctaagtcagatgtagagtttgagtgaatctctttaacaatcgcacctgtattgcttcttaacgtcagacctttctcgtttagctcatctggcccacagtcggataccagaatagatttctcccccatctctagggacgtttggagagcaacccaaatactggattcatccgggaactcatacgcctgagcatccgagagcatcttacgatgatgtttataataagagaccggcttgtcaaaatctatgagagatccatatgcctcaatggtttctgcactgatatccccgtcagacaggataactacttttgcagatagcagaatttcacgaagaactgagatacactcacgacgttgtttaacaactggggcgaataacagatcattcataactgcgtcgcactcatcgataaagataacatcgatctgtccaacaaagtttttaaacttgtggattgagtgaatagtagtggacatacgatcaatcgcaccgcgtttgaagtttagcatatctacggacttatcatactgtccggcttcaaacttcttagcgttagacgaaaccagggcacgcgtgttcgtaaccgcaaggaagttacctttcagctgatcacgttctagccacttcgtcactgcggtggttttaccagtacctagggaagccttgataaatgttaaatgaccttccggtggtgggcggttgatcttcaaatagttcatcccatcgggactatcagaggtcaacttgtgtacaggaacgcctttaacattagactcaggaatatctcgcatagagttgttcacaaacgcttttaacgcttgcttacgcccgttattaaaataatcctgtaggctacgggaattatccttcgtgttgatataatcggacagagctgaggtaatctctttctcaagccacgcgaaatcaacaccgtcctccagcgctctatggtacagtttaggaataatgcgcagataaacaccatcctctgcttcttccagttctgcaatggtttgttccactttctcagaggctacacgctttcctttaatctgattgagcagagatagaaactcttctttaaactccccacgagtggcttcataatctggcatagtgctgggcagttcgatcctagcaccgttaactttaaccagacgtggcttaccctccgctttaaacggatcggtaaactgatcccgaaaaatcgggtcagcgaaataatgcagctgtacagatgagtagtaagctaagtcggcaatgtcgaaaccatatttctgccgagagctatcattaagggacgtaaatagaaactttaactgaccctgagtaacgggaatattactctctaatagcatgtgcatacgaatccccggcttaattccagccgaagacgacgcatgggcaataaaccctgcgttgagcgggaacatgtcctcgctgatgctatttaataacttaatgacatgacgtcccatacccacaatgtcaaacctgtcgcatcctccggtatcggagattccatcgacgtccatagcaataatattgctcttatggtcgattttgaagttagtacgtttacgacgcacggccttctctgcaactaagcatgtacctcgtactgctacgagatgtggatcttgagtgagctgaaccatcagctcatacgcttcattaagattttttgggtcaaccgtatccactacgttaaatttgtagggcattgaggctggcttaccttctggatgctcgttagaaaactccttcgcaaaaaggtaatcagttgtcttcacttccttccagtttccggaagcgggatcgcgggagaaacccgcgtgtccttctagaatagaaaacattacgttttctcctatgttgaagaataaagcgatctcgaactatcaaggatagaacagcttaaaagtccactgactcaacaaatttccttatagatggaggggtggtcacttcctcattgctagaactggccgcttcgcacaactcccacacagcatgtaatcgccgctaagctccatgtggttgacccctattcgtcgctattgcgcagaggtacgttgctacttacagcttcacttcttggtcatttcagaccgcggtgctatttgctccacatgactaacgaacaaatatctgagagcctcgctatgccaacctctcttacccgcattctagatcaattatctataattccgttcggaatcaatttcccaataagccaaacccaaccaagtatgtagcagccggactgttctgtatactcggaagtgaatgagaggaattatgtcagtttcgtaactcacatcatttctctcaacctatgaatatattatataaaaatcgtggcgagattgcaagtaaaatatttaaatacgtggtaggtaactgggtttaaacatagaaaagaccagaggataatcccctggtctaagctcccaactaggcattccaacccataatattaattgagttagaagaggcattttgtttgccctcacgaagaacctctggggcatacgtccaaggctcgtcagctaccaagaaccccggagaaatacctgcccccggttcccggaatgctgcaaagttagaggggtggaacacaacgttgttcaccagaaccattagccctagatccgagaggtcatcccaatcaaagaggatctcataatcctgggccaaactacctttggacaagccaacacacacgtcatgctggatgatgaagcaaagctcctcgtccctcaacgcggcccgcagcaaattctctgctacatcaatcaattccttggggatatccgcccaggagatacgttccattttaggaatactcatttagttaacccttcaacttggaaaccgaagcgacgcagcacctggatccaactgttaatattttccggagcataataatcttcattacgtccgacccaaatacctgctgaaactcctgtaaccccaaccgggatataggactcacgcatcagacacacgtagcctagtgcaaacaccagccccatctcagttagatcgccccagtctaggacttcatcttgatcttcgtccataggaacccatagccccaggtgcatgttgtcataatcgaagtagacctccatattatcgcaccacacacgaagatggtccagcagagactcttttacgtccagaggaatttcagcccagggaactagcccaaccccttgattaacaaccttttcattgaccagcatattcttcccccatttggatgaattcgtgccactgcttagagtccgctcgtaaaacctgatagtcgtccgataggtgactcatatcttgtatatcgctgcgataacaccaactaccgttgggccataacaggatatcatcaggatggtacataaattttctcctccagccaagcctccacctgacctatgaaatgtttgttactaaatacactggcagcagtatcataccaaacggggatcccgcgttcttcgtacaaactctgctccaggtagttaataccgttgtttactacccacactttagtacctcgactatgggccggaaatagctcccaattaaaatcgattacttggttactggcaccaacaacgattaccagatcttgggttgtcagggtatcaaacaggttgatctgccccatataccacggagcggtttccccgaagaacgtaattgcaggcttaacccactcatacttacggtaatcaacagcagtgtacccgatatcttccacgatcacatctttaccacggcgatacattatctccgtcaggtagccatgagcatggatcacatcatcatggggaatgccagcacgctctagcagatcatccacgttagtggtgaagttaactacttgacctgggaagcgctcataccactcagcaattctcaagtgagcaatgttaggctccaccgtacccagctcctgccgccgcatgttgtagaactcatgggttagctcgtacaggttgcgactaggctcatcatcagatccctcagaaagggcttctaacggaggcatagggtcgtccagatagtgaaaccccttatcgaatgcctgaatgttgcatacttcggttagcttgtatttatcccacaggggagtgatggcacccttacggaacgttggcactccgctatcagcactcaatccagcaccacttacgataatcaatctacgcattacaggaactccatatagtttctcatttcttctttccgcaactgctcagccttttcggacaagcactcagaggttctgggatcgactttatctttccacaagtggttacggcatcgcagaagttttaccacgtcttctcgggaaatagatccgtatgctccagagtccatcataaagtagatacgcttttcatcagttttatggattttcataaatcctccgtttctcaattacaactatcatatcaaaaacggaggtgtttagcaagtgatttatttcaaattcatgtgcttgacccgttgcattacttcctgctgcttaccagggttaaacggcctgctacctggactacccaaatacccacaaacgcgacgggtaaccgagatattccccgacccacactgaggacatacaaaaccgtgctctccggatacggactcccctaggtacccacattcctcacattcatcgacaggaatgttgacccctatgtagtgggacttacttaatccatagtcaacaacccactctagtgcagagataaacttacgcatctccggaagttccacgaaggatatgttaccaccattggcgatggtagtaaagttagcttcatagtcaaatttcacgttaggggcaacttttgtgcgaacatccaggtggtggctattagtcaggtagcccttatccgttagccaatcatactccggatactgttcagcaattttagtgttgaatctattgcacagagactcactaggagtagcatagagactgaatccaagattagtttcctcagcttttttgttgcaacggtctttcatgtggttgaggacctgtacagcaaattcaaccgcaggtggggacatagggtcggcatcctcaaacattacctcaatcacctcgttaataccgatatatcccaaggacactgatgccctgccctcaaagataggccatacaagatcattggctttcaatcttaccccaaaagctccgtgcatatagagaattggtgcctgtttagcacgcacacgcttcaaccgctcaatagcccaatcgtgggcagccatcgctttatcaatatattcgtctagcagcttccagaacttatcgaagcacccctcagactctacagcaactagcggcaggttaatagatacaactcccaaattattgcgcccagcggtttccccagactcaatagctgaaaggaaggatcgacaacccatagggaacttaaaatcacctgtaacagccgttactctttcgtagctcacgtaatccgggtacatcctcttagaagtgcagatgagcgccagctgtttgatatcgtagttaggatcacttggggacttattgagcccttccttaactgcgaaaataagtttaggaaatacagcagtatgacctgaggcaccaagcccccgtatacgaacttccagcatagctttctgcaacatacgtgcctcccaggattcccctaggccgaacccaaatgtaacaaatggttgctgaccgttggagttgaatagagtgttaacttcatactctagcccctggcaagcgtcatatacttctttctctgtcatttcggtagcgtacactgctgccttcttactatcgtgcagccaacgctggccgatagctaagtgcttatcgtaagacttacgtacatatggagcaaagacttcatcaatacggtcgatagacgtaccaccatactggcatgagcttacctgggcaataacttgagcagtcactgcagctgccgtagagatagacttcggggtttcaatctctgccccgccgattttagtcccgttcttgaacatccccgctaaatctaccaggcagcagttagtatacccctgtgctcggtagtccatatcgtgaatgtgtatctctcctctattatgcgccgccaagaggtatgctggaagctcctgtgctaccacatatttagaaacctccccagctatcatgtccctctgtgtagggaattgctcgcttgctttattggcgttattaaacataaggtcttcttcaccctcgttatcgaggatactatagatattatcaatcaggtctagttcgttcatatattcctccagttaggcatatattataccaaatagacacaactatgtcaaccctattttattataatcaacagtaacttgatctggatcatcaaaacaataaaaaccggaaaattttatttgcttatctcccctattttacattactcgtgtgcgcccgcgcatcgcgcgaataaaggaaaggatatgtcctccgtatcattctagaaaatttcagttgcaatccacggcaaaacttggtatactggtattctaaattgataaacatggtcgaaatttgaccctctgtagacctctaaggagatcgcaatgagaaaagcagcacgtcgtaaggagtcgcgccgtaacggtagcgcaaaacgtgaacgtcacgaaaacgtcatccccgttgattttgaagcacgggagcgttttcaaccaaccgcaaaagaactcaagccgaagaacgctgagcaaaaacactatatcagcactatccgtaactttacagtgacggttggtattggagaagcaggtacgggtaaaacgtttatcccatctgttctcgctgctcaagagttggcaaagccgggttctgtgtacgaaaaattcattcttgttcgacctaacgaacctcttggcaaatccctagggatgctgccgggagatctgaacgagaagatggcaccgtggttagaaccaatcgccgatggctttaaatgggccttgggggaacgttcttatcaggggctggttgaacgcaaggcaatccaataccttgctatcgaacatgcacgcggtcgtaccttcaacaattcttatgtaattgttgacgaagctcaaaatatctccgtagaagcaatgaagtgtattctaacccgcgtaggtcaggattgcaaattagtaatctgtggcgacgtagcgcagaaagacattaaatccgattctggtctgcaactgatcatggatatctacgatcagtacgaacatgtgccattctccttagtagagttgcatgataacgtgcgttccgctgaatccaaagcattccaggcaatctttaacgatatgggaatctaatatggttactgaactgatcattggttatggtgagggtattacctctgaagaaaactggggctttgtaggcttcggtgaaggtatcacttctcacgacgaacgtcctgacctctaactctaggagcgcgtatgaacaacgtatttacactgaacaacttccgcactcgtaaaacgaaggtgcatccagtatccctggcaacagtcaataaatacaatgctaactatcccgaggatgagcggcgacaccatgccgctttcaagatagcaaacgagtttcctaaccaacccctcggtactaaagagttagttagtcgaatgaaaaaattacacttttattaaagtagaccgacacacaggcagcctcgaaaggggttgcctgtttttgtctgtaaaatctcatttgcaaaatggccgaaaacaaagtagaatatcttttaaatcctgacaacttccaaaaggagttaccaatgacccaacgtattgaatacgttatcaagcgtgacggtacaaaagagccgttcatggctcagaagctgaatgactgggcaaaatacatcggtatccgaagcgatgtgccgtggtctccggtagcggtagccgcagttaagaacctaccgaaaggtgatgtacactcagacgacctgcaaacaatgctgattaagtctgctgaatcaatgatcgagcgtgatcatcgttacgaccgattcgccctagagctgcgtttagctcagcttcgtaagaacctgtttgattcttacactccgccatctctgcgcttcttccacgaccacatggtagagctgggagcatgggaagatatgagcggctggatctctgatgaccagtttgaagctctaaacgaagttatcgaccacagccgtgacgaactgttcactaatgctggtctgaagcagttcatggataagtactctagacgtaatatctatacggaagagatctatgaaactccgcagtttgcctacatgggtatggcaatggcaatgctttctcaacctcactggagtatgctcgatgcaatcgacctttataacgcgctgtcgctacagaaaatcaacgtcccaactccgccgctcgtgggccttcggagcgctgacaggggcttcgcttcttgctgtcttgttgatggtactgacaccctggactccattgacgcagcagagcacgtcgtcttcaaaatggtcgctgcccgagcagggatcggctatcatcttgagagtagatcaattgctgatccggtgcgaaaaggcgcgttcccacactctggaaaactgccatattatcgacacatcgaccgctccgtaaaagctaacacccagcagtcccgtggcggttctgcaactgtttacactgcgttcttcgatccggaaatcatccaggtaatggaagctaagagcaaccgttcccctgatgaaaagaaaatcgataagatggactacaacctgaagtttaacagtattctcctgaaacgcttcctgcgtaaagagaacatcacactgatgagcttcctgtatgctccagaggtatacgcagcattcgactcaggtgatgtagcagaattcgaacgtctgtacatcgcagccgaaaaacgtctagctggtgttaccaaacgtgggttcaagggtgaagttctccctgtagccccggtgattcctgccgcagaactgattgagttctggaaaactgtacgtatggaaaccggccgcctgtacactatggatgcgggtgaagtgaaccgcaacagccgttacaaagatccggtgcgtatgtccaacctttgtgttgagatcgtacagccaacgttccctatccctcacgtggtagatctgtaccgtacagacgaagaactggataaaatggatgtctcagagtacggggaagcatctctgtgcaacttaggcggattcgccctaggtcgtatcaaaactctggaagaatgggagaagatctcttacatcctgttgaagttcgttgataccatcatcgagattcagcactatccgttcccagctatgaaatacactgcattacgccgccgtaacgtaggtattggactgatgaacgccgcaggagcgatggccgctgaaggcctggcattcgaaggcgaagaagcccgtaactggatccaccgtgaggcagagaaggcatcgttcttcctccacaaagcgtctgtacgtctggcaaaagaggttggcccatgtgagtggttccaccgcactcatacttctgacggtacgctgttaatcgatacttacaagaagactgtggatgacctggtttccgtaggtctcgagatggactgggagagcctccgtgaagagatcaaaactcatggtatgcgcaactctgtcctaacggcaagtatgccgggagagtctagctctgttctgattggtgttaccaatgcagtagagcctcctcgcagtgcagtaactatcaagacttcgggcgttaacaaagtaattactgtagctccgggtctagacgattgggacaccatgcagtcatataagtatgcgttcgatattgaccgtactgagcacatcaagtggttagcggttctgcagaagttcacggatcaggctattagtgccaacctgtactacgactttaacaaatatcctgggggtattattccgggtactgagattatcaaagatctccttaactccactaaatatgggattaagaacctctactacgcaaactttgacgtagataccggaggctctgcagcagagcagggttgttccagtggcggttgtactctgtaattaagctcgatccaaccgaaagcaaaattttatttgcaagtaggttggattttttgttataatattcgtatattaaatgagagaggaaattaaacaatggcaacagtatttaaccgcgaatgggatcacactgagtctaaactattcctgggccaagacctgggaatcgccgactatgtaaacgttcgctatcctcgtctagaggagctggcgttactgcaacgctcgcagttctgggttgagactgagatctccctggaagccgataagaaacaatggcctaatctgcctcagcatattaaaaacaagaccctgctgaacttagcctggcaaactcaagccgactccattatcacccgtgctccggaagatgctattttgaaactggtatctcgtcctgagctggaaggtatgcttattcagtggagttactttgagaatattcacagccgtgcgtattccaacattattcgcaacgttctccctaatccgggcgacttcattgcgactgtacaggctaacgacgaagcattctcacgtttagcactgccagtttctgttatcgatgaactgtctgaaattgcggatatctggctgaaagaacgtgaggatgtagaagcaactattcagttagcttcagagaaccttaatgactgcatttctaagtataatgcgttagagagcattgataacactgataaagaaaaggcagagctatccttccttgcaaacgaaatcgcagaggaacaggtacgtattaaagagatctcagatcgtttatatgctgatctgaatccacttaccgaacaattacagcagaaaatcctggagttttactacgctgtatacgctctagaagccattatgttctacgcatcgtttgcatgtacctttgctctggcggagaacgatattctgacgggtatcgctaagaacttacagcttatcgcgaaagacgaagcgctccacaccgttatggcgatggaagttctgcgtattatccagagcggagaatttcctccccatgttgtagcagcagctcaggctaatgctccgaagatcctgcgcagtattctggagacagaaattaactgggcgcattatattttcccggagggcgaagatattccgggcctgaacgccgatttgctggtagagtacctgtattataacgcacggctggcatttatggcaatcaacattccgtggccggaagatctcccggtaattatggaagatcctattggctggatgaaaggttggctgaacaccaagaaccagcaagtagctccgcaagaagcacagattaccaactatcgtgttggcgcaacctctcaggctaacccggacgatttgtctgacgaatttggagagttcctgtaatgattacagctttatacgcaatgcgagttgatggagcttttggcgtgttcaaccctgctacgatggatgcctacggggaacttccctggggctccatccccgaggagctagaacagttctacaaaatcctggatacctatcaggttgttatcctgggccataatacctacacaacggctccttcccgactgaaaaaggcactggagaagaaatccatggtgtacgtagtaggttcagcatccccaattctgataaaaaaccctccccgtaatgtgcggtttattacccacttgggttccaaaattagggatttctgtaatgaagttgaggtagtctgcataggagggaaagctctgctagaaaccctagcaactatgggctgtctggatgcgatttatcgctccaccatttatcctaaggctggtacagtaccaagcctagaccacatcatgtatctggaacacccgatacttacgtccactcctccggatgctgtagtaactcatgtagcttctggggaaaatgagcggtatcgttttgttatggaaggagtctatctgtgattcactatattaatgaaggcaaacgcattctcgaagaaggtgtctggctggagaaccctcgaacgggggttcgttgtttaaccgtaatagggtcaaactttgaatatgatgtactcggaaagaaattcccacttatcacaactcgtaaagcgtatgcccttcaggccatcatggagcttatcggatatctgcgaggatatgattccgcagaacaattccgtgctatcggctgcaatacgtggaacgctaacgccaacgaaaacgaggcgtggttggtcaaccctaacagaaagggaaccgacgatatgggtagagtctatggagtacagggcagaacgtggcttcgaccggatggttcccactttgaccaactctataagatctatgagaatttacgacgaggcattgatgaccgcggagagattctcaccttctggaaccctggcgaatttgatcaaggatgcttacgaccgtgcatgcatacccaccagttctcgctactcaatggaaatctgtatctcgactccttccagagatccaatgacttcctattgggacaggcatttaatatggtccaatgctacacgttcctcgcacttatggcccagatcacagggaaccgggcaatcagagcaaaccagcgtatagtaaatatgcacatctatgagaaccaatacaaggttctcatggaacatggtcaattcgaccgcaaacctttcccggctcctcgtctagagatcaatccggagataaaaaccctagaggacgtacttacctgggtttctaaggacgactttaaaatcgtggggtataagtctcatgatcctattgcatatccgttcaccgcgtgaggacttatgggattatttaacagacgccccaaaataaccttctccgaaagggaggagtctcagctgaagtttctggttcaatcctcaggattacacatagatgttatcctagggatggtaaagtacaagggcatggacgcactaatgcgtcagtttgcccccaaaccgccaaaagaaaatcctccagctaagcgggactataacagtaatttactggttcctccagctaaattactataactaatgtggccttcgggccacttatattaaaaattcatttgcaaaccacgtgaatttttaatataatagattcataaatttgagagaggaaatgaatatgtcttttactgatgcaaaagcaatggcagctaaagccaaaaggtctaacgatatggcagttatagcagctcgcagatctattatatcaaatattgatgggtcagcttcctcaggtaaaacagaagtagattcttacgcattgaatggtctgcctatcgccgcacggtctcagattatggaagacctaaaggacgcgggctatgaagtaaaagtaaatcatccgtttgaccaacgtgatactgaatcaattaccatttcctgggggcacgcataatgtttcatgtttatactgatggtggttgccgcggtaatacccgtggggtagacaacgttggtgcttgggctatggtagtttacaactccagcgaagagcaaatcggaaccaagtctgctcccaaacgcaacacaactaacaacgagatggagcttcaagcagtcctagaggctctgctatggtctaacaaaaaccctggccgaccaatgacaatctatctggactcaacctacgttaagaatggttgtgagtcctgggtctggggctgggaacgtaaaggctggaagaaggcagatggtgatacacctctgaacttagaccagtggaagtggattattgacgaactcaagaagtatcgtctcaaccataatgagatcccaactttcgttaaggttaagggtcactccggtgtagaaggtaatgaggccgcagataacctgctaaatgttcgcatgaccgagctagaaatggaggatatgtgatgttagagaatttacgccgcttagttagcgaaatgaaatatgaagtgctcctgatggagcctggtgttgatcgagtagtaatgaaactgcgaatcgcacgtatggaagcccaaatctttgaagcagagtggaaagctctgaggggtggagatgaattataatggcaccagatttgagggatttgttcccaaacgtaccacagtaccagctcgatctctacgccgcgtttctggaagcgtcaaaatcggggaaccctctacgcgtctaccaccaagaccgcaggcacgggaaatcctggatcctgagatggctgaaagagaacgagccgctcttaaagaaattgagcgaaagaaactctgtacagcaccggcatacaacaaaggcgggtaccagtacatcagctcggaagagcaagcgaagcacatcgggcggtaacaggtacgagttcatcatcttcgatgagcttgtagatgaaaatgaaaaaacgcagttgctaaacgataaaaattaacgtataatagattcataaattaacgaaaccaatcaaaacaaaggaaataactcatggctaagcagacctctaaaaaagcagtagaaaccaaagttgcaacttttcccaaaactgaagcgaatcgcaaagcacgtctggagcgtcatctgcgtaaacatccgactgatactcaagcagcatcagctgtaagcaaaccggccccgcgtcgtaaaaagccggtaactaagggttctacctctggctacgtctcgaagatcgttggctggagtacgccggataaggcagacaccaaagaagtcctgcgcaagacccagggccgtttcggtagcgtcaagccgaatatctttggctgcgaatacagccgtgagaatgttcgcgctctgtgctatggcgtaggtattaaatttacgggtaaggcaaataagccccgtagtcaaaaacgcaaaccagctaagaaggcataatgcgaaattttgtagctaaaaacgatttcaatcgtgcagcgacacataagtcggccctagattactctagggtcaactcccgggaactgatggattcgtgctacgaagaactcgaagattgggcggctgactggccgtcgatggaagaaaactgggatgtgtccgaagatatgactaagccaccaccggaggtggcttctaaatgtgataacacatctagaagcaactttaataacaaaggaaacaatatgcaaaacttacaagaccgctggatctctgtttgtgatatcgaatccctgggaactccgggggactgcaagagcacttttatcgctatgccgtctttcgcttttgtactgatgaaagatctatctctagatccttatatcgttctaggcacccctaacgttgcccagcagttggccctcggtgctaaagtgtccgccggaactattgcgttctggatgaatgaggctcgtgccggtagtgctccgtcgctgtccattattgaagctctgaatgctaaagacggcgagtctactgttctggtttgcaacccgactcatgagtcaccggtatccaaacatacgttcatggatctgatctgcccgttcgtagaggcgaaacaggtaatcgaaggtattatcgacgagcagggcatcgatactcgttctctgcgccactatggcaatggcccgcagttcgacatgtctatttacgaaacagtggcggctcaggctaatgtcttttctccgtctgatcctgcaatcgttccgtggaaattctgggatatctctagcgcccgcaacccgcgtgactactttgaggctctaggaggagattggaaagcattggtacgctgcgctgaaatctatgcacatgacgtaatcgagcgttacaacctgattcctgagggggtctatccgtcaaaacatgatccggtgtttgacgccctggtagaagcgtactgtattaaaactatcgaatcgaaattgaaaatttgatttgactaaatggctgatttcttgatatactattattcttgaatcaaagagtaaaggagaaataatgaaagcagccattctaatgatctccatcctcactagcttccatgcgcaggcaaagattgatgcgcatgagatagagtgcatagctaaaaatgcgtactttgaagctagaggggaaggagttaaaggaatgaccgcagttgcacaagtaacgaaaaatcgtgttaactatggaaaattcccgtccacatattgtaaagtagtctatcaaccagggcagttcagctgggttggtaagaagaaacataaactcgatcgtaaagacgaagagtggaaacaagctaaagagatagctagactagtttactatatggatcttccagtagatccgacgaagggagctttgtactttcacagtaaagatactaaaccttactggacaaaagacaaggacttcaaaagaacaagtaaaattggcaaccatgtgttctataaattaaaatctcagttgcctaatgcttaaaaagttgatataatagtttcataaattagagagaacagcgggccgattacgctgaacttgttttaatgtaagactcgtcgagcattaagattcgttgaatagaatcggtgagttaagagtgatcacctgacaaagttcgtgcatccagtccggataccggccagggagcgtattggacgggcgtaggttagagatctcttgtaaaactcgggagctgtcccggagtctcgtaaactcttctcctgatttatagaaaatggtggaatctcactttaacctgttcgaccagaatgaagcatggtgcgtggcctgccggagaggtggggagctgagcctgagaaactcgtatagctcccacactgacctgcctaggccgcaaattggagacatgtgtatagcgtctggtgctagttattgccgccatagtgggtagtgtgtatcttgagttagttgcgcttagacgcctttctaggggtacaccagccacaaaaagtggggtgtcgaaatcacttatgtagcaacactgccgtcctagtataatgggaattatcatggcgtaactgccggaagatgcaggttcaagtcctgcggtcggaaagagctggataactgatggttctattagcgaaccactcgctgctggagtacctcctcccctcccagggaaagacttgggagactcgcgggaacgaaacagctaaaccacgaaggactaggatgctgatttggctacccttacctgatatatgcccaaatcaaaagaagaactttaggcggtagcctagatagtgaagtttttcctccacgaggagtcgtttttcaagctatcaaaacttcacatcgaaaattcggaggtgtgattttaacagaccgcgtggaggacgtctctcctttaagtgacgaaaataatccttaaatacggcatgatgatcgtatgaactttggcgaggtgggatctcgcctgattctaagtgggaaagagtactcggatatccgttcgtacaaacggccgctccgagacctaagtgggacacggttgagtatacagctccgcggaagctcgtataccctgtgtaagcatgtgataatggagtcatgaccggagtcaccccgagcgaaagcataaccgctatttatagcacccttacacaggctagaagtgcccctgtttggagtgtgccccgctgtggagactatgtggggttatattagtcaccctgactataactggaagatacgtctgacagtagtgcgtaccaatgagacgcttaatagggggattcgtcccctgctactggcggtatctttaagagcttttacgagagttcttaaagatactaattgacgaggtctatatgaacgatttaagtatgttaactaagatacgctctgatattgagtctatggtctctcgtcgtagtgagctgactaagactaaacaaatcattagtggtggtacgcaacagcgctttacactacgcgctggagatcttacatttgatctgtgtggggagctaacccgagattacactttcgagatgaagccctgttacgatatggtgaagttggggcttatcaaagctctagacaaacaaatagatcagtgtacggacgcaatcaaaaccctaaacgttcagttcgccgctgaatgtgatcgtctcaaaaactctatcaaggtctaataatggtggcatctgtgcatactcctccgtatgaacgtccagcacctaatctgacacctgaacagaagcagctaatcgctagacgtactctagaatttaaggagtcgctgcataagagcgttggccggtattctgaacaggttcatgatctggttgtcaaaacacttaaactttattaatgcttccttagctcagaggatagagcaacggtcttctaaaccgtgggtcacaggttcgaatcctgtagggagtaccactttaatcgctgcccacacgtaatattcagtgggcagcggtaaaaagcccgcagggcgcagactgagattgattctacaaaatttttcttgcaattttgtcagaaattttgtataatagttctttaaatcaaagagaaagtagaggataacatggcatttaaaatcgaatatttaaagaaagatgttctgacggaactggttattgatgcgaatatggcccgcaacgaaggtactaaaaccgtattctataaagacggtagcgtagctcgtatgatcaataccgaagacattcaggatctgtacgtaatctccgacgaagaagcaggtttcgtgaaagacccggagccagctgaagatacccctacggaagaacctccggtagcggatacccctactgaagaacctccggtggaaggcaccccggaagacgaagcagcagtataactaactaactaagggctagaaatagcccttctctggttctcaagctcattgggtatgagcacccgcctcataagcggaaggtaggcaggttcgaatcctccgggagccaccaatttcataacaggagactaaaatgtctactaaaaacgcaatcgtatcctttgtggatgataatggtatcgtcctagagtccacagtaacagatatcagccctaaacgtctgctccatcgtgatggggatatcctggaaatccttaataaacggtctgagactatgctggtcattcctgtaaatcgtcttctctcgattaaaatcgtgtgggaggactaatggacgcccaattacaaacccagtactatatgcttctaggcatgttagaggatgctggcccgacagtcagagggcactatgagcgtcacaaagcagcttttgaagccctactaaaagaagttaatgagaacgaaggtggtaaaggctctgactcctatgccgcattcattatcgcgctacaagtttttctaatcaatcaactcaagtaataggctaaatatgctgaatattaaacgtaaaggttttttctacaagtggcttaatttctcttccgcatctttcacctatcggctgaacgacaacagagtcaccttgtgtagcctattttggcactcagtgtggtatttcctgctacagattggcgtaactgctattgctgtactcttctctttggggatgggaagtatcttatctacgttcttgggtctcacctttgagctgggaattactccctggtacatgcttgtagggttaagtctagcaggactatctacgatagtagcgattctgctggcgatagctgggatcggctgggcctgcgctaagataggggatcggatccaggaatggaacgcgagtaaatctttcgaaagggcacagaaagagtataatgctcgcgatgaagagcttcgcttcggtaacatctaccagaagatgagaatctataagaaggacaaactttgtccgctcattcgtgtagaccacggcgagtagtttgcatagtgacctgcattgccgggtcactaccaaaatacttgaaaaattcaattgctaaatgctttagaatttgagataatatttatattaaaagggaatagccaagtggttacggcatcggcctttgactccgagatcggcaggttcaactcctccttcccttgccaaatttaaaaatgctcctgtcgtctaagctggttaggacaccactctttcacagtgggaacacgggttcgaaccccgtcgggagtaccaaatttactgaaaaattcagttgctaaatgcttaacaaattgatataatatttatatagtttgttaaggaattaatctgatacagagtcggcaccaaaaaacacgcttgcagcttgctcggttattgtactgagggttagcaagaatagcggagtgactctccgaaacgcctggtaagcgtagagtgtatcgtatttgtgaagagcgggtatcctcgcatggctaattgctcagggtattacgcgcaccggattaattgccttaacaaattattgggggatgggtctgctgggagtggacaccgcacttgcaatgcgggaatcagaacggttcaaatccgttatcctccaccaaacaaatggggatgtggcgaaattggcagccgcgctagatttaggttctagtggtgaaatatccgtgtgggttcgaccccctccatccctaccaaataacgggagttcgtgatgaacatagaaatcatgcagttggatcgtaagaaaaatgagttccgtaaagtccatacctttccgagtaaagaagctctagagtttcatattaagtgtatggggctggtgctaccggaaagcgagatcttcgacttagcttgtgctaacggagttctgtacgtctgggaaatcacgtatcatgccgatcctgatgaactccgcaaagaagtagagcaaatattaactggagagtagtgctcatgggagcaagctgacttgaaatcagtcgccatcggaaacggtgagggttcgattcctttattctccgccaaacaactggaaagctggtgaaactggtagccacgcatcactgctaatgatgagtccttcaagggcatgaaggttcaagtccttcgctttccgccaaacaatggcccgacgagtaacggttgcccctttctagagaattttctgggcgaaaatccagaagtaatcaactagttgtaagtgggaagagtttcttagggccaccaaatttgagtatcatcggtacagtcgagcattgcgctgtgtttcttgcggggattacagctagatatgtctaaccagataatgtgtgcgatgtacattctatctgtggaggtctgatcagccctcgatggtgctcaaatttgggatattatcataactggataatgacctcgattgtggatcgagtctatcttggttcgaatccaagatatccctccagattactgcaccattagtttaatggatagaatatagagctacgaactctatggttgaggttcgattcctcgatggtgtaccataaaatctctgctgagagtgacgaggttagccctctgggtcacatccctcttctagccgcctcccataaatgcaagcatttatgttctggccctagacacaacgttgtactcagcagagtgcgcataattggggtatagctcagtaggtagagcggaggtctctgaagccttaggtcacaagttcgattcttgttgcccctgccaattgcaccgtagaggagaggccgtcctcgccagtctcataagctggagatcgcaagttcgaatcttgccggagcatccaattctaggagaagatgatgaaaatctcttttacagaacgagtactaggtactggagtaatgctaattacttcctgggatggcgataactggtgtaacgtgacaggcttacgcaagtcagaacaaacaccagagaacattgctaaaatcaagaaacgaatggcagaggctgctagacgtccaggagcaccacgaaacggtaaacgttgaggtaatcatgattcgctatcaaggtatgctaattaatacccacacaaaagagatcgtattttgggcaccggcttttcatgacacgtacaaggaagctgaggacgatgctagaatagctcaaatacacccggacgaggaaatctgcgtccgtcagcaagaacaataatgctctgatagttcagttggtcagaacaggcgaccgataatcgccaaacactggttcgagtccagttcggagtaccaatttttgccccctataggatatttcatcggaatatcctccagcgatggtacgtagtatagtacttacctgttaagcctagacaaatttactttgtgggcaaaataggtatagataggagaagaatagtagcgtaagattcttgaggcaaattctttaggtcagttggcagagatggtttatgcactcgcttcatacgtgagactacagtggttcgagtccactattgaccaccaaatacttgcttagctcaatcgggagagcatcgtctttacacggcgagggtagctggttcgaaaccagcagcaagtaccaatttacagtgagacttaggtcagggccgtcaaacgtccgagaagctgtaatttctgatggggacgatcccagattcgtaagaataccccatccttaccttcacaggttttagcgcaatgctatgtaaaagtctagggaatcgactccatgccgtccaggagtataaatggcgaatctaggactttagacggtcattgtcctagcgttagtgactaggttccggcaatcggccctagtgtgtaacgtagtggttcctttaatacccaagcatccacgttaaaaacaagttgggatttgttaattgcagaaacgggaaggctatcaaccttcagttaatgtcttagacaacttcaaaccaagtgcaattaacagctgcaagcctggattaccgctcttcggagcggataattcaaaaatttatttgctaaacgctcttatttactgtataatagttacataaattaatgagaggagttagcaaatggaaaagattactgcaactggtattgaatctgcactggtggttgattgggcaggatgggacggagatcacgaatggatggtcttttatagctgtacgcttcagccagaactatggactaggcttaccgatgagcatgctatgccctacggtatcatagatgtagaaattgagattaacaaactggttggcaccattatggtgcatcgagccgaaggcgatcacaaggaaatcttccgtaaaagcattaaactggtagtttctaccggtgactttatttaacaattaactgaggaaatactatgtacacacgaccaactaatggaaattctgctgtagtccgcctgatgattgtacaggataacctgtccaataacatcgagtctctagatcgccgtatcgaagagtaccgcactgaactgctggctctgatgcgcgaacgcgaggccaagatcgaagaacagctagaagtctgtgaagcgatcgatcgtctggttgacggaaccgcagtgttcatggcgggagctcccgcagagcctaccttcaccccggtagcgccagctgacatgcagtacgctattctgcctttccatctggaagaagaagatggcgatggcccgtcgctggaagacgttgttcgcttcctgcttgcctccggtttcccgaacgggggtcgttaatggattttatcgttgtttgcggagcgaatactgactgcttcgaactgttaaacgacgccctagacaaggttgatgaacacatgcaggagggtagaacccccacgttcattgacctgtctcaaggtaaaacttacttctacccgtcgcttgacgtagaacctacagttctaccgatcttcatgcactccctctcatgggacgaagaagacgattaatgaaaaattcatttgcctagtaccctgaaatttagtataatatttatattgaaacgaaagaggaaaagcaaatggaagatgaagttaaactatacatttgttccgattgcggtgagttaagtgaatgtcattgggagtgtccgacttgtgagtcagacgacttaatggaatacgaaccggaataacaaattaagcggctatggtgttcagcggtcaacataccggcctgtcacgtcggagccacgggttcgaatcccgttagccgcgccaaattctctctgggctaagagatatgaccgtctagaggtatcctcggacacaagggtcagccctagtcacaataagttagcaaatatctcgtttcgacgaggtatttgaagaggttctcacgagagcttcttcaaatacgggggaatattctgtaagtggtagcagagcggtctgtaaaatcgttgccattgcggctcgggtggttcgactccatcttcccccaccaattttgacaatcaaagagatccgggttcgaatcccgcgtacgcaacaggcggcataaaggccttatagcttaaatggacgaaagcgctttggttgttaaacctatttgggagagaagcagtaagtggtataggcggtcgcctgttaagcgaatgacagtgagttcgaatctcacctctcccgccaatttagggtaagaacagcgacttaggttgcggtgaagcgttagcaatcggtggaactccggtgcgccctaattaaacaatgcatcattggccgagtgactaggcagaggcttgcaaaccctcgtagcatggttaaaatccatgatggtgctccaattatagattgctagctcaatggttagagcactcgccttttaagcgataggttccgggttcgagtcccgggcggtctaccacattatgggacttcagctaatcggttaagcatcatggatagcggggaatcccggtctgtgaggggagtaacacgtagtctcccaagttccaccaaacatcagagcagcgtgatgtactgcaaagacccaaagaccggggtggacttcttgattcaaaggagcaggcacgaattatgcaactgtagctcagcgaggtgagagcactggtttgaaagtccaggggtcgttcgttcaaatcgaaccggttgcaccaaattaatagtatcaatagcttatggagctgaatagtcctaaagctcagggtaaagcagctggccgttagtgagcagacttggaaacgtctggtgatctctaggttagctggtgcgttggttcgaatccaactgatacttccaaatcccaagtagcccgttacaggctctctgattaaactcagacaagcaggtgatgggtgacaggataaaataagccaccgatttccggccgtttgacgtggtaaagtcctccagtcaagaagaatttctgcgtgcagaaatcactgaaagcaatggggcagacaacttgagatagattgcctataacgtctcaagtagtggcattgacttagggtggcattttcccgaaagttcgaaaaattcatttgctaaacgctcttatttataatataataattgtataaattaatgagagggcttacctaatgaaccaaaaaattcttatgcgatataatccacgagctttatggttccgctgggaagtgattgtatcgtaccagatacgagtgcgtaacggtgatcctgagaacaacattatcgtgctggagacattctctaatagagacgcagcagttaagttcctgaacaccatcgacaatactttaatcaaggtatattaataatggatatctttactactcctgctatcaacttggtcggtgtcggcctattccaggcaacggtctatcgtattgatgacagcactgacgttgtaacgttcattgtaccggagttcttccttgagaagttctttgaagagtttgagcaattccgtgaagagcataatgcttactccaatatggaagatctagcagcgatgttcccaactgtatacggctacatctttgaaggcaatgatctgcttttggataagtcagagctggtagaactcaactggggcattagctttgaagtgggctctccgttcccgcggtatttccaaggtctggagattcgataatgggcggctactctaatttcatcgagaattacattaattccgtagattcctggaatcaggaaactctagcggtagtgcttaaagagagattcaatatctctactctagaagccctagaggctatagaagcctacttggataacgattaatacccacttggtccaatctggtagaggcatgaggcttaagacttcagggttcccggttcgagtccgggagtgggtaccaaattacggggcacgactgatggggaagccggcctggcttgggttgagatacggttcgattccgtaaataaatggtctcgtaattccgcacaggtgatggtaggttcgagtcctactcccgtatccaattttatagggttagaaatatgaagcatggtaaaggggagtccaataagctaaaagagcttattgatgcggggtttataactccggatattaccgaggaaaacgtactattcatagtagagaatattacgaataaagagtacttccgtactacctcccatgtgaaaggttctagttcataccgtagaaatacaaaacatttctgcccaattgtggctagagacctactaaagttttaccataaggaaaatcaggctaaggggctgaatgccgggtatgtttacttggtatctaaccctgcctgggacagttttaaagtaggttccgctattgacgtaatagatcgattaaattcttaccagacgtactctcctgcacgagattacaccctggagttttacttctttagcttcgatcgtagacgagatgaaaaattggtgctggatagttttgaacgctccaatgagtggatttccgctcctaaagaattaatcatccgtaagatgaaagaacttgcagtttacagataactctccgtagcgcagcctggtcagcgtgggtgccttggatgcatcgggtcgtaggttcaaatcctaccggggagaccaatttcgcctctttagttaagtggtataacagctgccttgtaagcagccttcggtggttcgattccatcaaggggcaccatttctgcgattaactgtacgggttacagcgtccgccttccaagcggtactgagtggggttcgattccccctagtcgctccaaattcggtaaaatgaccgtcccctgacgttgcggggaattaaacaaggaactgggagccggtaaggccattttatcgatactacttgagaggtacaacaatgaaagcctttgatgcagaactagtgttctcactcttagctaagatggaagcctgcgtagatcgtgtacgtgcgctgcgtcttagtatgtttagctcttaaattatttgctgttctagagccaatgtagtccggggtgccgacgtctgcctggagctcgactctataatagttaggacgtcacttaacagccagagatggcaaactataggagaagcaaatgttaacagttaaagtaatgtcacctaacggtggcgaagaaattcacgatggttcaagcgttgggtttaatcctaagcagaagagcatctctattgctggccttgatcagcatatcttcctgaaagaagatgaggtagcctacgttatgaatcagaatggtaagacagtatctgtctaccacggtagctaattttattccccgagtgttactggacagcacgccggtctccaaaaccgtgcagtaggagttcgagtctcctggggtttgccagtttaaaggagtgatcatgatcacttatagcaccaattttatggggccagtctccaacaattggtacattcgtatgggtattccgtatacggaagtaaccgagccgaatcgttttgcagatggcgggcaactaactcgaaaagtatttgccaaacgatatgccggtggtcgcattgacgttcgtggtattgatgattatttcggccaggaaatcggtgttccgattatggaggccgagtcttggaatgaactacagcagtttctctggacattctcatctgataaagttctgacactggaacaaattgtacaggctctagaggacgagacaggttttcgcattgtttggtttaaggagccagcatgtacatagatcgtaaccaactgttcaagttcctagagcttgaccttcgttggcctctatcagtcaatccgggacgagctactggcaagacgttcgaggctattaatacagcctatgagtttgcagtatttaaaggtattcaagcagtatacgtagcatccggtgtccgtgaaatggcacgcctagagaagaagtataacgagcttcaacctcatgttaaaattacaacgtatagcatgttagaaccctaccgtataggtcgtcgattcagctgcattatgtttgacgaacctagcttggctattaagcatggcgcaaatggttacgtctctcgtatagccagagaaaaccagtgtcctgtaataatttttggagaataaagtggaacaagaatttcaagtcttcgtagacgcctctaagagagttttattcatacaagccaccgatgaaggtcatggcctgcaactttccttcgactctctggagcaaataaaccagattgttctgagggcacaaaaatccttagaaaagaacactgaggcacctcctgacctctaaacaaaagccccttgtctctttgagcgaggggctttttctttataaattcacttgcaaaaatgccaattttgccgtataatagatttataaattgatgagagaggtttccaagatgaaagtaacaatgaaaaacacagaagaatttatcactatctgtactgcatatgcagatacgcttccacctgagggtatggacgaccacacaatgcagttagtggccgatatttacaggctggcagaattagcagcagcacagcatgaactcttagtatatgtcagagaacgtttgcagatgatggatggagataaccaatgaacgaactgaatgagttgcattacgccgaacgtgctattgacgagctggatttcgctggtggttattatacccgacacgtcaacgcaatgaccgcggaagggcttaatagtaagtctgcgatcgctgcggaattagcagtccgtgactttgttattgatagcctccagaagactattagcaacttgagcgaaaacaacaaagctgctctggaagccctggataagctgtccaaccatcttcttgcattggggatcaaataatgaataagcaatctctacgtggtatccgagtctttcgttctagccttgttgactctttctacatctggggcaaagcaacacgacgcactgttgagcaagcactagacggtacgttctatgattggcgagaaaaagagcgaaaccccgtattcaaccgcccagggctgtatcacgatcgtgtatctaagacagcgtggtacgaaattgaagtaacccctggcgttatcagagcattctatacggattgggagcacgaaaagtgggtttgggacaatcagattgctcccggtgatcgtattatgaactatgccgaatataaagaaatgaagcgcatgttcgagctatacgatgttcctaggctgtctcgcccggctatcttcattgctagccaagagtactggcatactgttcgtatgaagcgtgattttaacaagcatcacctgcgctatgagaaagaacacggcacgctgcgagaacgtgtagctaagagaaaagcggaactgcgtgaaaaacgtttggagaagaaatatggtgaaagctagtctcttacgcttcacccctggagttggcctccagtataaaattgttgggggtcacaagtttcaatacttcactcctggtaagctctactttgttgaactacacgatagtagggcagggtacaaagtacggagcgacacaaatgaaggcatttgggtgagcttcacacaagttaaacgctggtttacagttgaaggatataatgattatgagtaaagttgtatatttcgtaaaatgctgccgtgacaccttagagttggtcgaccacaaaatgcagacctgtaaatgtggtgcttcttccatagatggtgtagccggagcttacgtccgttttctaggcgacaaaagtaacttcatgcgtctgaatgagttccagctcgaagttgaaaagaaccgaccggctctagaggcagaggccgagcgtctcaaagatttcgatgggaacatcgtagcatataacatggtaagcggtaaagacttctggtctgaactggctgaaaaacttaacatgccgcggcaggcggctaaggctttatatcatggcttcaactactcgccacgttggaattaagttttccaacagtaacagaacttacgtttaccgagtacctagttattggaaatactccccggagataggtgatgtagtagtcataccggggaatgttatgtttaataatcctcgtcgcgccaaagtagtagaagtgcatggtatgtatggtaagccagagtataaagaaagaaagaacatctcttatgtagagctgcatgattacttaccgaaggaggaacgtaatggacgataaaattgctcgggaagcaatagaacttgttcgtaaacgactggaagaacgtaatgtcgaggtgccgaaaataatggtgattggctatggcggcattggtggccttcctggctttgctgacctagaaagaatggaacgagagtctcaggccagctttctagagttagaatcctacgctctggaaatggaacacgaacatcctattggcaataactttatgccacgtagctcccgccaggaagttacccacggcaagactaattcctggcccactccgaaacgcataggtagaaaatgattagtacaggtcttggatactctcacgaagaattatgcaaaatggttgaaagaactccgtttattaaaaagttagtcgaggagcaacgaccagtgtgtttacatgctgcctgtaccaagtgtcatggtactggtgttgataaaaacggcaagatgtgcgtacacgcactgtcctgcccgtgtcctaaatgtagctggagctgttaatatggatctcggatattgtgtagtgcatgaattcatggagcaggggttgccggatcgtatttgcgttgtaacctctcgtaatctggaagcagcccaatcgctagtggagcgtctttctggttattatcgtgaccatgaacgttaccagcagaaagtatttgacctgacaaaactgtaccatcaaaaagctttggatatgcctactccccagctggacgatctcaagcagtttagtcctgaggcttggtatagcgtcaaagatgcaaacccggtagattatacagtacaggtgttctcgcattacggtactcgtcactggataaatcgcaagtgggataccatggttgactaccttaattcggaactcgaaaagggagctgccgaatacaaaagaaagcgtgccgaagccaaagaattgaaaaattcagttgcattgtaggcgatttttcgatataatagttacataaattgatagggagagcttcatgagcaaactaagtattgaaagcattatccgcccgttgatgcacgggtatgtacaaggttcctgtgtaagcgaaactgaagctctcaatgttatcgaagaagagcttgtggctaacgggtataaccttcacgaaggtgttatcgaggatctcttctggcagaccgcggaagatatggagatctttcggtgcgtgaattgtgggtggtggtgtcctgcttttgaaagggcggagaaccaaatagaggaaatctgccaggactgtgagccagacctcgaaggcgaagttgacgaacaagataacgaaggtgaagactatgagtaagcgttcaattgcagcaatcatcgtattcagtatgctgtactctggagtatctctggccgcagagcgtaacaaagtagagatctctgataacggtcgggttcgtgtaacaacgaatgggattactaaagaagctggtaagtttcgtaaatcagaaacccgttttggggaaactaagatctacacgaacaaaacctacggcaagcccgctgtgacactggaccgctatggtcgtcaggtagaagaggaggatgatagcaatgagtaatcttcaccctaaacttcaagagaccctagactggattaatgaagagtgtgcttttgaggaagctccttactgtgtctgggcaagagctggtgcagccccctcggagtggtgtactgtgtttgataatcgctaccggataaccgttgaactaagcctaaaagaggataaagtatacgctaaagcctctatgaccgctctaggattatccgggtttgtggagatgcaagagctatgtatgcctaactcccaccttcgggttcagatcgagcagttggcaacaattcgcctgatgttaccagaggataacattaatgaccactttcataaggtcattgaaaatgaatacaaactacggcgggaacgtcgcagagcacgacgggaagtagagaagactcggatgatgtgtaacatgaatccacacgtataacggtagggccgttataggagtcaccttcctgttcctatccggagtcgtgcccgcgatgaacgaagtggtgagttggtcgctgaccattaactaattcaaagacaaactgaggaagcaaaatgtttactttatttttactggcagtagcagcgtggatggcagttggtatcaatcatggtctggattgcgctaaggtaatgtcagctaaagccttcgagtttctggccaagttcgccacccgtaaagatatcgaggccataatcgccaggggcggtgccaaagacgcagaaggtgtcttgaagtccttcgacaagctcctggagcttcgtagtggtaaatatgctgcggagatccgctgtatggatcgtaagatcatcggcagaatttgcaaagggattttcattgtacaaggcgctttgaaaggcccatttgctaagcctaaaccggacagcctcaaaagggcacagatctttaataattattgtgttgaaaaacacccgctaaatcgctaactacccaagcccgacatcgaaaggtgttgggcttttcttttttaaaaattacttgcactctcgcttaaaatgttgtataatggttttataaatgagaggagaacaaagatgcgtattatctctaaattaaaggacgtatatgatctacaaggtactatgtatgatgcagaaagagcatggtatcgcgaagaggtgaaaaaggttgtaaacgtatccgctgatttcgaacaaattattttctacgctgaaatcttgcgtaaccgcacttcctttggatacggaggtgttaatatgggaactctggaagttcgtccagtattgatttgtggtacactacgctggctgtatggttatcacactggcctaggagcggatgctgtgcatatccagactttcgatccagttaaagtaaaagaggtactggaagaccaagggtactacctgcggatgggttgggacatgaatacgattgagaagatcgacgctcatgttcgtaacgcaactgctacggcctctgcgttcctagagaccttcaacaagcccattgcgatggcatgggatgctgcaaagtctaagacggacccaacggttaacattaccgttaaaactgatttcaacttccatgcggaagatttcccgtggcaggaaattgatccaaacctgtatcgctggcaccagaccctagaatcctatatcttcggtgtgctgggtcaaggggaaccaaagaccgaatctacgtctgatcgtgatcggttaattgctaagggcttcgatgctaaagtttctttcaggaatatggagcggtaagactggagcaattctgtttctggcaattgcggcgggcaccttcggtggtgcctactacattaccaataagctaacagatatgtccagctctttacagtccctatcaaaccgtaatgaacaactagaaaagacagttggtaatctccaaacagagattcgaaatcgagatcgcaacaccactacctacataaccaacctagccaagaaccaggaagacctggacggacgtatcaataaactagatgcagctagggcaaaagagggcgtagttgccgctaaacctaaacttgctaccaaagtggcaaaagacaaagttaatgagttccaggagagactttcatgcgtaactggaaatatggactcctgctctcggctgcaatcatcgcatccgggtgtgcagaacggccagacccaagtagtacagtaacggggatagagccgcaacacctaccgtggccagcaagcctacagacttgcccgtttaattttgagttcataaacgaagaagggaaagtgtatgttcgcataccttaccaagattggatcacaatgggcaaatgtaatgagcaggtctacacctacattgccaatctgactgcattaacgtgtacctatcgcgtgtcacttaatgaatatcgttgcaaaccgttcaataaggaaacaaaatgaaatacgttttaggattagttggtgatgccggtgcaggcaaagacacctttgctgacatggctaaggtttgggcctgggaagtcctcggtccggagtattctatcagtaaattcagttttgcggctccagtttacgaactcgcggctgtaatccttggagtcacgccagaaaagctggcagagcgcaggacaaaagagattaagcagtggttttgggtgactcaggaagcccttgagcgtactgctaacgtctggaagcgttttgggatcgacaagtacgccgatttctcttacgtttggcctcagtttgaagcgtcaacgctatatccgttggttgctaagactgctccagacttttatcggggtcacgagaccccgctgtacccattatacacgtcccctcgtaaaatgctagaatttgttggcacggagttaggacgcgctctggtggatgagaacttgtggttaaatattgtggtcgatcgtatcactgctaccaaagctgacattagtattatttctgatgttcgttttgataatgaagccgctctagttcggaacttccccggtgcgcagaactctagtattcttaaagttcacgcccctaacaacatccacgctattcaatctactcatgcctctgctagaggtgttgcaccggagtttattgatgatgtggtcacaaataactttgacggactggaaaatttccgtaaaaatgtaaacgcattttgcgacgagaggattctctttatataaggtaataatatgggacaaattaataacgtagagcagaaaggtggcaataagactcctaattacttcgcctccctggtggcgactaaggcagagtataatatttaccactatcatctcgatgggccgatagtcgatgtagactactaccgcgatctatcagtcactctggcaactatgcaagagggagacactcttaatctttatattaatagtcccggcggatacgttgatacagcagttcagttgtgcaaccttatcatgaactgccagggaaccgttattgggcacctggttgggccatcagcatcagctgcctgctctatcttcctagcatgtcatggttggctggtgcacccttacgttatgttgatgggtcatacctatcgcggtgcgcactatggtaagggcaaaaacgagatccagcactatgcagatcagttcaactcattcttcgaggatatgatgctagacctgtactatccattcttctctctagaagagatcaccgagatgatagaaggtggtaaggacatttggctgacctccaaagagatcaacgaacgtgtagatcgtatggctgcgcaccgagagcaagaagctcgtaaggctgcgggtcaataaaacttagtaggccagggctttttcgctctggcctttttctttatctaaattctacttgacatttgtcccaaagtatgatccgagtaataactataaatttttattgcaacttcctccaataaagggtataattataaatggttagaggaggttcttaatggataaatttatacagttgatatcgctgttactacaagaagcgaaggatccagcttctcttcttaaacgtttgctaaccttattggttggtctagttatctacctctttatagctaatacgagtgaagtcatgtcgtacttaaagactttctctacttcggcggtcctacaagatgttaaagtacaacgcacactagagtttccaaatgtggcacgagagaaggcaatgatcctattctcacagactcgagctgatgccgtcttcgtggttaaatacaagcctgaggctataaatgattaccaaactatcatagcttgggaaagcaacgttcagttggataaatccgatgtatccgacaaagcagttgacaagacgtctatgctctaccgagcgcatttagacggtctgaactttgcaattgatgcaagggaaaaacgaggtttatcgaaatggtctggaacgggtttgccaccgttcaagagtgcaaatttcgagtatgtgtacacgtgcccatactttaaccttaataacatctactctggatatgttgccgtcgcgtgggagaaatacccactattagacgaagacatgagcatgtttaatgactatatggcaaaaatctgcgcatcaccgcagagatcactagggagatcaatatgagtttcagatttggaaaccgtagtctccagcagctcgatactgtagatcctaaacttaaggctctggctattcgtgctctggaactatcaccccacgattttaccattattcaaggtaaacgtaccgtagaacagagtgctcaaaatatcgctaatgggacgtcttttctaaaggatcccagtaaatctaagcacgtcacaggcaaagccattgatttcgctccgtatatcaatggtaagattgactggaacgacttagaagcattttgggctattgtcggtgcatttaaaaaggccgcaaatgaaatgaacatcgccgttcgtttcggagcggattggaacaactctggcgactaccgtgatgaaatccaacgcggaacgtatgacggcggacacgtagagttactgtgacattaaggggagcttttaggctccccttctttgtatggagcaagcaaataggaggtggttatgtttgcaagtttagtaactataatgctactcaagatatttcaatttggtatagtattcttttccgcaacatggattttaatacgcggtgccatttattttcgcagaacacgcttagctagggttgctagatggctcctacatttcgtatttggtatttttggtgtgtttcactgtccatgtgagaaaaagagagggacagggttttgctggctctggttaggtctagagaattgcttctcattgtccttggcattgttattcggtatgatagtcctagctataacgctagcatttataccgctaatgtacgcaggtggggtgacgtctatcctaacccttacttctcctgtgttgatgtactcagtctaccccattacactatttttcgtaagacgaggcaagtactgcgattaatgaaaaattcaattgactttctgctcgatttagcgtataatatatttataaattcgagagaggagatacaaaatgtcggacagattttacactcaaatgtgcgagcattttaaagtagctccctacgagttaaatatagctctgcgggatcgtgagtcaccggagtttaagaaaattgctaagaaatcggagggtgttatgtccaacggtaagaaaatgacccgaattgaccttaacaatgcgctaaccgaactgctcggcgttaacattgagggccagaaactttctatgccaactttaaccactattttggcaaaagtcaaggcaggagatgttaaaaaagtagcagtgcctgagggtcgtctgaaaaagccgtatcaggaagctgtaatggaagctttcggagaaaagctagacctggataccgcaaccgtaaaaacaatgaaaacactattggagagtattaataatgtctaagaagattgtattccttaaaggttctaactgtgccccttgtaagcagtttgaacctgtttttgataagctcaccgctgagttcaatctgcccgttgaaaaacgcacggacgacgtagattctctacgtaagttcggccttcgcactgtacccgcagtagtcctggtggatgtggagaacggacgtgaagaagcacatcacattctgagtggtgccacgcttcgctctgcggtagttagtaaagctatccaagactttatcgactacgtagaagaataatgcctaaccccggctcaatacgagaccggggttttttattacttgctaaatgcttaaaattttgatataatatttatattgaattgagagaggattacacaatgactaagcaagcatatcttatcctgaataacggttttgcggtcggcactaccttcgttgatctggggtacacaaaagaagagtggcaagctctcagccccgaagtaaagactcagctcgttaacgaagccgcctgggagtacgcagaggcttacgtggagatggtagatggcgagttagttattgtcgtatctctaggcgctgtaggttgtgatgctcacgtacacacggatttccagagcgaagaagagtgggatgaattagatctaactcatcaaaatgctctgattaatgaagcgttctgggaagttgtagactgctacgttgcgttctgtaaggacgatgatgaagccaacacctgcactaactatggctatgaacacgacgatgtggagtgctaaatgcaaaaattctctagagactggtcttctgatatggcccgtaaaaatcgagctgctgcctactataataagaaaatacagctcgataagttaataaagggtatcacctacaatgtagagaggggcttttctggcataaaagtagatgccaggagcttggactactcgtgcatactgtgggctaagcagaatgggtacgcatttaaacgaataggcaatgaaatactgattgcctgggaacccgaaggtctagtgcaatacgtaatatacgacccttatcgaggggaatatgtaagagatcacaggcagcagcccacagacttctcgctgccaaaacgttactatttagagacgaggtattaatgaacgttcatgaaacagttactgtgcccgataatgttaatatcttcttcatcggagatattcatggcgagtacgatatgatgatggatgccctgaaacttgctgggtatgaagaaggtcgtgactacgtgttctgtgtaggggatcttatcgaccgtggcccgaagaacttacaggttctagcgaagttcctgtacaatccgaaattccgctctgttcgtggtaatcatgacgagttcatgattcaagacgactatgccaactggatgtataacggtggtagctggactatcacggaaggtttcgatacggataccctgaaaggtatcgcggaagacatggacagcaaaatgccgtacatgatgacagtcgaacaccgtggcaagcgttacggggtcgttcatgctggtatccctctgcgctaccaggctcaaggtatgggtgtaactgtacctgtgtgggacgacattgtgcacgaacacgaatctacaccagttctacatcgtttgggtgtactgctgtgggatcgtgatgtaatccaggaagttgggtttaacctgtatcgtagtggggaaaagcatccgtacttcgatcgttacgccagcttctccgaggagtgtgcagtagatgtgcctgaaatcgtgggagtagactacacgtttcatggtcatactggtgttccgttcccgattcgctggaagaaccgtgtctatctggacacaggtggcacctttaacggtcgcatgaccgtggcgtcgccggttctaggtcaattatacacatttaccacaaatcgtgatgatccctgtggttccgctgacattatttaataggtgaagcatgaaacttttcaaagatttggaagaaggtgaagtattcgtagttgctggtggtttcgagttgcagaaatgtgtcgcaatgctggacaacggaaactccgtgtttacagatgacgcgagtatctcggttctggttgccccggacactgaaacctgggaaccggaagagttctgggagatccataaagatcgcccaatggacgatctactggacgacattctattcactgcctgaggtaaatcatgaaactcgaatctcgctatattgtatttaagcagtcagatgccgctaagtatctaaccagcactgctattcgggagataaacgacagcttatctctgatctttaaaggtcgggaagctgacggtaaggtagggttcccgaactatatcgttctagaggaggattggccagagtatcctatcgctaaagaagctctggaaggacgtatcgtgctggaagagtttaataaaagggcggagaagaaacgtggggctaaggctgcagaagatcactataagcagcaccagtccactgaactactccggggtgtttctccattctgtgcagggtggaacgactacatgagaagactggtaatcgaggagtaaccatgtatactggaatgggaaatgatatggccaagatgtttattggcctcttaatcctggctgcgttagtcggtgcagcaattgtaggcggaatctgggcgctcgtagcatttgtattttaaattcagttgcttccgagccaatttttctgtataatagctttataaattgatgaggaagcaaatatgaaaaacgcaatgatcgaactgaatgcaaacatggaatctcttcgccacgcagttaacaccgcccgtgcttcttttaacctgctgatgcgtgatgaaagcataccgctgtctgctcgtgttaaggcatttgaggagttcgccgatgaactccttcatatgggagattacctcagcgactccccgtttaacgaagatcgccgggattaccaacacgcctactgcaatcgtggggagatagtttacctgaccgatgttctggagagtgtactggagtacgcaggctctttcatgaaacttccagaggagtgggatgatgcttcaaacgactacgttctggatgaaattcaaaagaactggccagaggtcaagaagctggtagaagagcacattcattctgaagtttacgcttaccggatcgattggtaaaaagtttaaaaattcacttgctaagtagttagaatttcggtataatatacgcataaattaacgaaacggacggaaatcattatggctaagaacactatctcttacaccactggtaaaactgctgacgaacaagctaacaccctgaccaaagacgaaatggttgcggtactggtaatcctgctggatatggatgggttcgaaggtcagcttgctaaactgtctctcccggcacttcgtgctctgtacgaaggtactaacaaaaatgctgcggcctacaacctcgctaaaaatgaagcgcgttgggccaaagaacaccagcaggttgctgaacgtcgtgctgagagcttcgaacgtgacctgaaacgtgaaaaggcgaagaaaaagtaatggtactagaaattctctccgggctgttaatagcagccctcgtaactggaacgggtctggcggtttgggtatcaatactgcgggaaactaaccgcagaatgagattgaccaataacggactccatgaaaagttgatggatcaagtacgagacgctgatgaattctctgctgcggctgaacgactcttagttcgcctagcgaagatcgaagaaataatcggccaagattccacaatgtcgaagacaaccaaaatgcggttgatcacggagattaagaaatgatctcaccaattgtagcagcgctttacctggtagttgttggctacctgtctgggaagtaccacggcttcggtttaaaaggtactatcaaggcagcaatgctggttcctctgtatcctctggcaattctgttaaccgggtactacgcctgtgttttaagaatctttggccggggcaaagttaactatgataactgcacagcattgctggatgatattgaaaacaccattaagaaggaagaaaaatgaatcttaactccaaagaacgccaagtgttagtagatgctctgcgtcaggtagtagaccacgatttgctttgtgatgaagatatcgttgagtcaattgccttaatcgccaagattgagcttgctgaaaaggactcatggcgtcctttgagtgagcttccgcctctaggcttggcaatcgtagtacaacgtgctgatggcgctccgtttaacactgtgatggttcgcaaagatctggcaaagtcctactccccggatatcatcacgctgcacactaagatcaccgacgaacctttcgagtttaatactcgtcacttttactggagactgaccaatgcttaatcagcttcgaatctataaattcctggattgcaacttccaggtatggcgagaactccccagccgtttcctaggctgggcattgttcctctccatggtggtttcagtcttccataacgtcccggcgacgttctacatggaagcaattcaaccagtcactgtattcatttacgagatgtatctcgtagcaattaacgggtggaaagatggccgcatcaactgaagttttaaatcaatatttcaatcgtgagcaccaagagttcagcgatctgttcatccagatgtttgttaacgctaataacgctctggactatcgtttcttcaacgagttccatgagaccacgttcagccatcaggatatcaactccgctctgaaagaactcattggctccaaagtgataccgttccgacagactgcaaatgcagagacgctagaacttagcatggtttggggcttattcaagaaagcgtatgagttcggtaagtaccagaacgcacgctactggatctacgaagtgctgcagaacacagcagttgtactgccgcgacagatgatgatgggctggatcgctaaacaacgtcctgaacgcaacgcaaaatcattcgcaccaattaacgacgggaacttataccatgcaagtgaaaaatttgatgctccaaaatccgtggcttgatcgcctggcgcaagtagagaagatgcttctggttgaaggtctgaccgaagaagacatttgtctgaactccttttataactgcaaaactcatgtaatgcaggcgcttgatgaagagcgtgttgaactgagtaagtttatggtgaatatcgccacagcccaagttcactggcaaacccagggcttatccgccgatgatatcctgaaacataccctgaacgctattgcagagtatgggaaagctcgtggtgaagctctcttggcttcaaagaaagagtttgataaatcggagtcaatgctgaaaatggcaattgatatccatgtggaaggcatagacggtactattcactaagagggtgacaaatggctaagaaacgcgttgtggtaaacttcctagaggaagattctggggattgcgaatacggttgctggaatactggctacggtgttgaggttatggtggacggcaaatgcgtccaccgtcaggaagcctgggcaagctgcactaacaacagcagcgtagactttgatgtgttggcccatgttcttcagggcatcaagacgaaggaaggctacccggtcaacgcagatcacatcgactttggagatccttccgattatccagaggagtttctggatctgttcacctaacaaagaggccagggctaattgctctggcctttcgtggtttaaggatgttaaatgaaatctatagacaactatttacggggagaaaatcctgtagatcaatcagcagttactgttgagaaggttaggaaagagtgttttatacttactcagcgtggaggaggtaatcagcctaatcgagtgtatcttaactggaagcaatccagagacctatacgagaggttaaaaaaggaatttgagtagtggaagagttaagacagaagataaatcaagagttagtatgggaagctaaatccttccccattaatcagttccttaaacgcgacggttcgattaaccacaataagataaagcaactgaggccagatttcaggcaagatgctaagaaccttatctttattaaccgtgctctagacgctcatggggtattcttcgggtatgagaagctagtgtttcacagcctaaatcagctggtggagatatggtgtccagaccatcaagattactttatgcaaactgctagaagtcacctagagggcaatggttgccaaaaatgcagacaccgcatggttactagagttacggattatggaagttacaccgtgccagcatactatcacaaattttcaattgacggagactccattatttggtataataactccagtaaattgataaaacctttggaggttaaatatgaaatacgattccctgaataatccgagcaccaattatctgactgaccaatcagtctccgagatcaagttccatccgaactactccccggactctagtaagccgagtgtagcagctatctctttccgcttccgtaacctgcgctttacgttcgtaggtgaagaggctaagatgatctctataattgacaaggttaaggcagtaagtgagctgtccggtagcgataccgttaagttcgaagcgttaacctcgttactgctgactagtggggctaccgttggtaagttcgaacttattcagccgcatgtttctgcactgaccaataccagaaacttctgggatcagagcaatatcgagagcatccagaagtgggatcgcgctactgagttctacaacaagtaagagggctaggatatgttattctgtacagttgattttgaagaagctaacgaaacgtacattgtctacggcatgtctgaaaacaaagtacgtatcctctggaatcagttccaagtagaagtaccggacgacatatccaagactccgaaagacttctttcatttgatagatgttaaggcagtaaaagctcgtaagaagctaactccttacgcattcccaggtgcagtattcgtccatgagttaacagcgtatactaacgtggttctcaaaaagtctcgacagcacccaggctatctcacgatgttgacgtacaaagttggagctattcacgacggtgagctggtggttcgggtagatgcacgcttgcagcaagaagtcgaagaaatgattaggcagtgccaaaataaagcagaattaaaacaaagagcacgcctatacgacatggcagcacctagcgaggcagttgccgcatatcacggcttttataaagaaatagctgaatccgatgaagatttctttatgtaagaggataatacaatgaacgagaaatatgaagtatggactccggttggggagaattgtagctatcttcttcgcaccctatgtactcgggaagatggcaaacctttcgcagattacttgagcgaatgccatgctaaggcccagcaggacaacccgctattcaagatcagaggcgaggatatcctcaaagttaacggcgtgccgtacacgccagtggacagtttcgccgctcttcgggtgtttaatgaacacagagagcgggagcaccggaggatgatggatcgcttgacaggtagagagccgttctcacatccgcggtggaatgaagtaagttaagagccacaatcccgtggctataaaaaagagtccaatggactataagagaaaagaaaaatgagcagatttaaaaatgcactacaaagagcacataaaagttcatctaacactgtattgaatgcagtggagaaaccattcccgaagtacccggaagaaatggtaactaagttagaggggatgctagaggagctttacgagctgcaccaacgtaagtactcaactctcacaactaacgagcgtagactcgtagagatgttctgtagacgttatgcagtaacggaggacggtaaatcggcaaaagatgatctaggagcaaaatatcacgttctcaagatgacaccatacgcacaccgcttcgctgttaaggttctcaatcagtggttctcctatccgcagattggtgaactttatattatagaagatgaaccactaaaacatgacacactttatggttctcatgctcctagctataatggtgaccccttccgttgtgcattaaccagctaccctgatcattatttaccggtcagagcatctgaaggtaaacatgagatcttcgcagtttggcagagcggtaaagcgatgaaagatctcaactcgtatagctttaagatgcgagcatctgtcttcccaggtggtgatcctaagtttgtcactccttggggcattgagaaagaagaaccagccaaaccagaaactagacatgaaaccctacagttattcgactaccacaaaggggagaatgagatcaccccgagtatcgtagcgcatgttgtgttgaagcgtgaacatccagatctcttcattaagctgtacggagaagactatgaattctcctttgatcagcacctcctcattaaggatttcgatcaaacgaatcctgccttcctcactgagttagagaacctacgttctcaactgtagtctacgagttcacggggtaaacatctaccccgtgacactttttcaaacactcccgtaaaaattcttgacattatttgagatgtatgttagaataactctataagataaaaaagttagcttaaatagatagttaacacatccgctagagatgtgcagatattgatttttcaatttcgtaagtgtcagggccctgtcccgattcaagacacttaatgcgaaattacaaaaattgatcgatctgcacattatcgctagccggggtgtgcgatagctcgttaaaaccctaaggggagttattaattactggaaactaaggagaaaatagggaaacgtgggaatgaactcacgattactcacgtttaaaagtaggtaatccttacacaccatcgtttcgcggctctagggttgaactctagtcatctttctatacagggcggttatctaccaacacctaaggggagggcggttattttccaactcactttttcggaaagcaattcctagaaactcacacaattccacgaagttccacacatcccacacattaaaacgctagctgcctaagttctaagcgtcacctcacactaccccacacctaactctagctgccccacaaagttcccacacaaactcacatcattcgcctaagttctaagcgtcacatccactaaataaaatctctagctctcaaatattaaagaagctaagcatttctagatttctagcaattgtaggatttgcacataacaaaacgattgtcggaaatgcacattactcctaaatccaaaaacactgtcgaatttgcacacagctagtagattgtcggatatgcacatataaaaactagtatcggatatgcacatatatactagcaaacggtagctgtggatcaaaatcttcgattctgtgaatataaaatatctcctgaaatttcaagcctttttacacggtgtgtcaccgtgagttcgcttgttttttagagccacagaaaaaattcctgtgtcaaccccctttacccccatttaactcataatattttcccttatctgccccctgcccccatcatccccgaattaccccaattaaccccgtttatccctcccccaaaaatacccatcggatttgtacatactcacccagactcgcgcccaccgctgcgctgcagcaaactgcgcgccttccccctaaaaattattgtcggatttgcacatattagtgtcggatttgcacatgcccccagggcggtaaaaataaattttcatcggatttgcacataccctagcagcctcacgtaatattttgcttgacaaattgtcggattcgcacataagcgcaggaagggccgggggtcggaaatgcaaatgcgaatgagaatgattcgcatttgagaagttgaatgcgaatgagaatgatttgcgtttaccgagctgaatacgaatgagaatgatttgcatttcggaaagtaagtgagaaacactatcatttaagttatccccagagttatacaaaattgtaaattaggttgacgcctcaatcgatcggtagcgagttatccacagacttactaacaggttatcctactgtataaatatacagtatttcccggcaacactttctgctaatgtcaattttaagcgccctagaacgcgctctaagcgatttaaatttcgtgggggtattttagtaaggggtcacgcggtggaggagggcggcccctagagcaaggggcaaccgctgcgctttgctttttcgcgctctaattcgcgctcggcgtcaaccggtgatcgtgaccagacctctagcgccaccaggccgggcaaaatacatagcagactaataaataggattgaaagcatcatagagccgacccaatgataatgagaatgattatcaagataacaacccagggccattgcacgcccttaacgttttcgttagtttgcagttcccggcgaaaacgttggttagactggcggacgtggtaaatatcgtgcccccggctttttgggctaccgccccttaatgatctactcataagaaaacctcagcgccccataagattagcaggctaataattgttgaaatagcaatccattgcgtttcaaggatcgcccccggtttcattaataagcctccttattgaacaaggtatcatagagggcatacccgcaaaaagcgatgaagcccataaccatcatagaaccaactaaacccaaagccagcatagaaaaagtcatttttcgatctcctttgtctggagtcataataataacataactctagctggaagcaacccctatttttagtggtagacaaacaaatcctgtttccctatagttagatctcccggcaagcatagaaaaattttgcttgctaaaaagctgggaatcttgctataatagattctcagccaaacaaaggagtaacagaagatgttacagaaatttacccccgttgctaatttgccgatggttcgcggtggcgctcgcaacctgttagacggcagtaagtgcgcctctattggtcatattttggccgtttaccgctcgaatatggaaagtagatccggctatgcctttgagcgttgccgtgactacgttctagccaatcccggcgcggcgattgttatttatcacgatgatcaatatttggttgacagccagcctattgatctgatagtgtctaccactacggacgcttatttgtataaagcgtccgagggtaagcaagcgtcgagacgtttttgctaccatgaaagcgaactgctcgctttcactgatgcccgcgcatggattaaaaatctttgtgatcatctggaactaccaccagcacggatttctagcgaaatgatgatttttgtgcttgataaggacggaagcattctgctaccatgtaacttctacgatattgatatcgaagaaggggcaaggactggaaattatcgttatgatggcgagctggaagatgttgccccggctattactgaaaatgtagttaaccctaataattttgagactggagctttacaaatgaatactatcaaatctactgctaccgctatcgttgccgctaacaaaaacgctgctgtaaacgctgctaaactggaagctggttctatcgtcctgaaaaaagtttccggcatcgccgccagcaaagcgccgtttatggttcgcggttatgttgacacggcggtaggtcgtgtggtaattgctaacctgctgaatttcgcggttagccagtatgcgccgaacaaccgcaaagcggtgattgcggctgacgctgcaatgcaagccgccatgttggaactggtacaaagtttcaacgtcggcgaaatgattgacgaggtattaaaaggcgtcaatctttctagcctgattgaaaacgacgtagcagaataattatccctagcgcctctataatggggcgctataataattaccctgctaactaactggagacaaaaatggaacagtttaccgctacttttgaaggtaaaaagatgacgcttgccgatatctggtatcacctgcgtgataatggcgatcgcggcaattatgctattttcgtcgaaccgaaaaatttggataatctggcccgccagattgaccgccgggactgttacccggatacagatgatatgctgggaatccccttgaggattatcggggtatatggctatggctttgatatctgtattggtgatagtagctttgaaatcgactgcgcatccggcgctaccgaaatcgaagtattcctaattagtttaggttcgctaacgtttttggatacgccaccagcggaaccggaaccggaaaagctggaggtgaaaacgtccgttattgttagttcgctaactatggatgagctggcggatatcgtgtcaacgtatgacgaaatccatgccgacgcgattaaagagctaaacaaccggcttgatactttccgcgataagctgtaaaaccctcccggcggctaaatctctagccgccccccttattggagaaagccatgtttcatgttgaggaaggtttaaaatccggttggaaagttagcggggtcgtatatctatgatttacatctatgtcaacaaatattttctggcccactataaaacgatggagaccgtgatccaatatgttagccgccagaatgcaaggcatattgatgaagtggctacacttaaaatcggattgcgtggcgatcctatcaatattagctggcctttactaattttgatttgccgcgatctggtagcgggtaaacctatttccgtttccgcgctgggagaatcttacccgctttccgatgatgtagatttgtatagcctgctaactaaatataaaacagagcgcctgttttatcgtggcgggtcagtatgttctagtgggtcagcaattgaaacggtatttcgataatgaaacgttataagctggtaattaatagcctgataactattgaggggagttattatgagttctctcattttgtccgggaagtagttgctaacgtgataattaagccgcaaatggttagctggctaatagacgtagcgcaggaatta

SEQ ID NO: 26 - DNA, 172068 bp, Unknown
  bacteriophage strain capable of infecting bacteria of the genus Klebsiella
ctcacgagaacgcaagggctttttattaaatttcgtataaatctggattcacaataaccgcacatatagatgatcttttatgtgcggcttcttgttctaaggtttgtttagatgaatgtgctttcaagcaaccccagtaaaggcgtttactatctggaaatgatcatcgaagaattccccttgtcgttgcacgacctcatgcataggtagccagaacgcgtctgctgcatcatcagcaccgcccatgatacgaggcaatgaaccatcgttattaggttcgagcttgatatactgtgctacagtcggttttgagaagtacaccgaacgtttcggatgatcgaacagcatcgaattacggatagaaccacgaataaccttttcaggtactttaattcgtacttcttccagcaattcacggatcgcgcaatcaaggaacgtttcattaccgtttttgtgtccacccggaagcgccaacgcatctttaccaggcgcaaacttacgacgaattactaacacgttgttattacatacgaccactgaatcagccgtgcaacagttcagagaatccggatacggatattttttgaacttgtcaatctctcgttgccagtgtgtatcttcatgggacaaacgttggaattcttttgtttgtgtccattcatcgataaaggaaaccgtagtgctaggcgcatattttaacaaatcttcgtcccagccttcatggtgttcccagataattttgcgtaaattggtcgaggatagatcctggtctccaaccttcacaggttcaaccggaatatgattccatccgaatgctttaagccagtaagaatctttgtctttttcgtacccaacgatcgcaattcgatcatttcgagtttcatcgattgccatacgaacacgggatttccatttttcctcgttatagaggtaatccggaatgtgcgcgaatttgattctggctgcatcttcaacatcaagtttgcagatagaccagcgagtgatcattgcttgacgctgtttagcggtcaatgggtttaatgtgttcggatatgcataagcagaaccgatcagaatgtaaaccgtatcagcaacagcaagggcttcccttaccattttctcatgaccatagtgaaaaggttgaaaacgtccaattactacagctttatcatatttgtgtttcataacgtgctccacgtttaaaggttaatcataaaacagacgcaattatcaacacaccaaacaatccaccaacgaaaccaaagaatagtgaaatgagtatagtcagtacgatctgttttatgttcattatagtattctcgttttagatgtcaagcccccaaagagggggctttaaaacattatttacgagaatcgaaaatcactttaccagcataatccgaacccattacagtttgaggtacgccacctttatagcgggtagagtagttcatctgtacatccagttctttccagcggatcatttccggtgtaatggtgcgttgcagggcggcgttggcttctgcttctttcttcgctgcatacagacgggcatcagcatcacgttcgttagcgattgcagcgttttcacgcgcctgacgatctgcttccgcttgttttactgcttgtaatgaagtctgttctactttttgcagttcagctttagcagcgttaacctgttcttcgcggatcttcgtgttagttacctgttccatgataacttccggcagggtgatatcctgcaagaatacctgtttcacagtgtaaccgtaaggccgcgcataatcttctacttcctgctgaatcgcaatttgcagttggttttggatcttcgcatcaaacaggtcttgcgcttttggtacggatttaccaaattcgcgaacagtggaaagcagtttttcggttacatacttatccagtgcctgatcctgattacccgcgttgatacggttgatcggtgctttgctaccgtcgaattgcagcattacggtcatatccacagtggatttaaatttatcctgggacggaacctgtaatttgtcgaacttcatcgcgatgtctttggtgctgaacgtatcaaacgttgccagcgggtttacaatgtggaaaccgggcagtacgggtttcggtgatactttacccatgaaggtttcagttttaaccgtaccgtcttgcacaatggtatacatgttaggcactaaccacagtgctgcgactacgcccagagcgatcagagaggttttcttcgggttgttcacgatagtgtttaagttcatcataatttccataagttgttgttcaattcgatagttattctatcatcacatttcacgctgtcaaactatttttaagaaagttttgtcagcttgtagattgtttgatagcacaagcccttaatctcgtccaggatgttcttcaaagaactatctactgattcgtagatctcgtttgcttcgttggctattttacggagatacgccaccgtgtcaagcacattttcggtttttagcacaggtttgtatcttcccgtgattcctatgtggatttcggtgaatttatcaaccaaatcctgcatatcttcgtaaaaaccctcatatgctttatgttgtgagtatgaacctgttgcaaaatgtgcgctatgcatataggtaacggacataaggcacatgccaataaaggcatctatcttgcttgagttctcagattctgtaatttgtttaaatgattgcatgatgatccctttatgaacgatggatacgtgcaaactcatacgcgaccctaatccctagctttgcgcattcggattcagatcggcattgtttttggtgccattttcgttccatgtagttgtagaatagttcgcttgtatttacgctgggagggatcgttgtgatgtatacttgaagggccgcattaatataatcgtcaaattctttctgaaccggacggtcggcggcgtgtgttgtgggtgtcatcatcaacaatccgaacagcacagccattgatatgcgtttaatgttcataacaattactcttttactcatagacccactataggtctactcctgtatatatttatagcaaaaacgaggccgaagcctcgttataatatttttgctgtaaagtcaatcaagtaatgtcataccaacacaaacttctttcgaaagcgcgtattttgttcacgttttctacgttttcatcccaaccgatcacaccagctttcatacgtttcagttcctgacgtaaacgggtacgtacttttgaatcaattttctttactgcaatagaaagcattgcattcagatcgccatgagctttgttaccgtcgcgacacagattattatcaaatcgaatgtatgcacatcctgatttgtgtttccagttggttgtgtaccaacgtaacccatccggatcaataccatgttgagcataataacgagaatactcttttacttcttctatattttcattagatgaacggtcacgaagaggattgtatttcttacggtaagtgcgactcataatgatctccttttgtttatgcttccactgtatcagggttgttctttagttgcaagtagtgttttcgacaaagtgaaacatatttgtcttctgccccgatctcaatctggtcgccattagcaacaaatttgccatttgcatcaatacgggcaacggtagttgctttctttccacaatgacaaacccctcgcaactccctgatctcatcagccagagccagcaacatataagaaccttcgaacaagttcaactggaaatcggttcttagtccatatgtcattacgggtatatctaattcgtcaacaacccgacacagatccatgacatttttcctggaaaggaattgcgcttcatccacaaacacgcaagaaaccagattcgggctgtcgctataaaaatgattgttgtgaacatcataatacaagtccatatcaggcgtgatcatggtgcatgttgcttccaacccaatgcgcgaagagatactctgtttaccttctcgcgtatcaattgctggtttgtacatcaggatccgcataccgcgttcctggtagttgtatgcatcagtgagtaaacgagcactcttgccagcattcattgatgcataatgaaaatacagtttagccatttatcctctcaacaaaatctggggtattctggaattttccttccccttcatggtttttgcatgttttgtttgaacagtagatccaccaatcccactcatcataagggggtttggtaatgttcattacgcaaattaaagggaaatgacaatcccgacaacgaactttttctataatgtgtgcgttagccaattgaaaaccatcctttacccatgagtttttcattatgtcgcgcaagatactctttgatttctggcatctggatcgcagtgtcatactcttcttttgtcatggtatgatttgcgcaacccatacacccgcacacctgcgcgttacaccaacggagtgttccgtatgtcgcaatcaccttcattgctttagctttgattttgtcagtcatgattataaccactcatttcgttatcttgtgcttgatgtatatcaagataccacatattgattttacttttcagttcgtccatttccttactcagacaattgtcaacgatacatagaacattaacagtttctttacgctgcataatgttgatgttattcgctttcatcgcttgcgccaatgcattacaggttttaaccagtgcggcgcgttgtcctttgattacggcgatccgtttgttcgctttcttaatctcccgacctgctttgataggatccatcatgattaattcgccttacgaggatcgaaatgaacgacaatgatcgggtaatcaccagtcacctcattaataatgcgcttaatgagttcccagtcgcccccagcgaggccagcaccgattaaaggtgtgatgataggctttccagtcttaacggcgtcagcaagccctacagcctgtttaaaagcattgccgattgcgtcataatcgacacgcggcccaggtgtccagaaatcatattgagtatatgcattgaaaacaatgttgcctttttcgccaatgtaaacagaacaagttccgagcttatcacgggaaccttttaacgtattggcatcaacttgaaatgcaccaggaatacgatcgcggatttcgcgagcaataccagcgcccatattgcaatagcagttgcatccgtggatcaaatggccttcaccgttcagatacatattgacagcattacctttcacttctttaatgatcatttttatttttccgatatagtagggccacaacaaggcccatcaaaatcacaaggatccacaatacagtgaattgaacccctacgctcattttctcgctttccgttcacggcggcgatcttcttgatgacacatatataaaacaccaccaaaaattataaaaccgataacaacgcctataaagtatccagcactaaacatagtcatcatccccgcaatagtaacaaggcccagtgctctcatgcttaccagcattgtacgccaagaacaccacaaccgccgccataataataaaaatccagatagccattagtaaagtcctatgccagcattgaattcgtcaaccaaataagtacggaacttttcgcaccgttccttatttggcgcttgtttgcatagattcatcattggttcagactgcaaaaactctttttgtttcagcaacttaccgcgtttatacaggtgagcattttcctctccccacatataagcaacatctaactgttctgcgatcacttgcttacatactgcgacatctttgatatcacgattgttgcataactcatccaggcgagcatcacccgcgtgagcaaatccagcaaccagagttaaaagcagtgctaactttttcatgatgattccttattcatcctcttcgataggggtataataatgcgcattgcagatatacgcaagaacttttttcagagacatatcagagaatgtcggatcctgatttcgtctcatcccactaccagtttcaacagcccaacgtttgttagctggattgtatgtcagccagtagcaatcccattcagacagagtatgttcgaacagatcgaaacgcttacgcccatttgcttgcggccttacaaaaggttcaaccatttctaaagcggttaacactcgattaatgttcgaaccgtcttcatccatcgcaatccgcaaacagtattggttaatgtccggatccataccatcgatacccaggccgatagattcgaaaaattttgtcgccgcgtgataagacacactagaagaacgatattccaacatcacagggatcttttccccgtccttgacgttgttaatgatatcctgatcgataagttcaatcaggtctcttttctccttgatcaaggtagaaatttcttcttgcagcggggctatcttcgcatgaagttcttttatccgttgatcaattacggacacttcgaaagctaaatttctcattgcacccattccccgtttttgtcgatgtacatgatccaatcagcaaccgcccaatgggaagtattgcctttcggagtcgctacgatgtaggaaccagctttaaacagtacgcgtttagtttcgttcaggatcaggtcactcataatgtattcctctcaattagatgcactcataataaaaaagcccccgaccgaagtcaagggctttttgtcaaatgatttgtttttcttctaacagcttcgcggttgtattaaccatacgagcataatcacgggcttctttctttgtatacttgaaaccagcgttatagctcgccagcgcctttttcaagtcgcctttgtggtaatcaagccagtactccagttcatagatcgcatacttcgatccaccttgaagagtttcgagctttttgattactacgcgtttaggatatgacttatccattcgtgcgctggcgctacttgcggtaacttgccagcatccataagcgtgatggccttttttacctttaccgacattctcacatgcgcgagactcgatccagacaatagccgctaaatgataacctaaacgtttagccttatctttttctacaggttttgcagtcttcaaatcatagttgtgtccaactcgataagcatactccagaacctctttctgcttcggtgtgatattatccaaatccttgatgtaggatggagaatttttgtttgccggaggcttcacagtagccttttgtaaaggcaattgatgagtaggcaaatccgcaatgaaatcccctagcggatccgtcgcagcgttgccagaaaaagagcacaagaaaatgctggcagcaataataattttcttcattttaatacctatgttgcaaaaagagtggcaataatacaccccactttatatttatgcaactattttagatagttttcgcgtcacgtagtttatcgttgataaactcagcaatgttataatttgaaatagcctcgttaggatcgtatagtgcaatgatttcatctaacgataccataacggcatgtttaaagtagacgctccagctagtagtaaggatctcactgttgtcaaatccacagttagggctgaacaacgcgcggtatttgtacccactgtatttcgtcagacgattcgtgctgtgcgcatcactggtgatcagaaaagttccctggtgagtttccacaacgaaaaagtatccgaggcgttctttgttgtccagcatcttttcaaacttgcgatcggtttcttcgcgaacaatacgagaagtcagcatttccaacactttatcgtattcgggccaatcattctcgatcacgattgcatcaaacggtttcttaccattaatcccgcgcccgatttcgattttcgtgcaaatttcgttgaacgttttcaaatcttctggcgtcagttctttaagatcgctcaattttgctacataataacgtttttctagtttcatttatggaaacctcaattcaaaaataatttcacagagttaccacatttgggacatgtgataaattttttcacgacataatcagcagcagagaaaaatccattgtaaatcgattctctcttttgctgtatatcagatagttcatattctaacccacttttacagcaactgcaaacagtaatcagttttgggctatggataacagtaatcatatacacctcacaaaaaagggggctttcaccccatcattagaaattgtcttcgacaaacgccgcgagacgggaacgatacactgtatcaagaatgatatggcttgagtgttcgtattctttcagcttttcaacagcccatacaaacccgttgttaacggcagtgtttcgagggttgtcgatctgcttaatgttcccgcatagtatcagaagtgtgttctctccgcaacgagaaatgatagatttaatttcgtggttgctaaggttttgacattcatcaacaatcagcacagaacctttgcccggatccggatgtccgatactgcgaccacggaagtaatacaggctagggaattgcaccacccctttttcaatcaaaccttcaatgtatttttcagattccggattatccttaaacagaatgttcaggctagtaatacaaggttcgatagaaggccggagtttttcgcccaatgtaccaggaaggaagccaatttcacttgataacgggctatctgacttcacatacatcaagttagcgtaatgtccactattaaccaggtgcatagcaccggaaacagcaagcattgttttaccagaaccagcgccgcccataatggtagcaacatcgatttcattgctcataatggattcgacaaaagccgcttgcagagaatcacggggctggatagctttcatgagtttgcgtttcatagcctgttcgtgcttaacaggtaagacattcaagcaaatctcatcagcagtcaccacacgcccgactaactcaccatttgaggtaatgtactggttaggataaaaatcttcgtcaggaagcgaactgtaagtgatttgggctacattatccgtatatcccaacacttccacggtatcccagaaatcagggatctctacgtaaccggaatacaatacatcgctatcttttaacgtatcgtcgccagtatactgttctaccttacacccacgggacattgcgatcagcaacatcataatatcgcgagtaactaaggttgcatcctgttgcatacaagtttcaatgattcgttcgtcttgcttgtcaagagcaaacgttttgtttccgacataatcaaccactttaagggtgatagtgtcagacagtgctgggtttgtcaggtttaaaggaatacctgatttcgtaatcgcatcatatgactgaccgaaaataacttttgacagaagccggatcgccaatcgtgcttcgtgcgctgttcgttctttcgttttcaggtgatctaattcacccatagtagcagaggtaataatgatttctgtaccaggttgagtgaatgaatagattgaataggggttactaatcaaaacattggtgtctaatacgtattttgacatacattaaccttatgtggtttcgttaaaaaatgcaccgaaaacctcttttgctttccggttataaacggattttgcttcttctggagtgttatagtaccccaaaaattttcttttttcatctatgtttatctgcgctttgtacttcccattggctttatgataagaaacacctttcaaccctgtactactgtttgagttacatttctttttcatcgcattttgctggttcgtcgctttctgtaaatttcttgctgtatctccattctcaacaccatatacatgatctacgataggaggaagataaccattctcaacgtaaaacactattcggtgtcgcaaatacatagaacctttaaaatgaatttgggaatactcgtttttgcttccggcttcacttccaggagacatagggccgcgctgaactttccaatacactttacctgtagatgtatcaacatctacaaaattcagaagagattcgatcccttgaatctcttcatgtatggttcttgatgaatagccatgacttttcattacatacccagcgaaattacgtgaatatatgctaatggatgtttcttttgtacacaatgcatgagtgtattatacacaatgtccatgcgttcattgcgcgtaagatcacactcatcaaaaataaggtttattgcctggtgctctattcgacgtccacggaaatgattaagaattgcccctttactggtcaatacatcacatccggtagcaccatttagctgtttggcgtcttgtgctgcatttaacgtatgcgctacgtaaatgttaagggaactatgggaacgtttcataaaatcaaacgcgcctttagtcttttgcgtttctctgcccagatccagcctggtttcgaataccataaaatcgttagggccgtaattatgcgttggttcttccaactctcgcataagatgcatcttacgacattcttcaattgtctttacataaaattcactattcatgttttacctttaaggggccaaagcccctttgttacgctaattccacatgcggggcatcaatgaattttgtttcgatcggaaggttcgggtcatttttccagttgataccaaaacgcagtttaacacccagttcatcacctgcttgtttaacagcattcaggacaggcaaccacactttagggtttgtttgccaaccttgaggcaatacgctaggatacagatccacagcatcacccgtgatgtgttttgagttcattgtttgagatacacccttacggacgttctcgcgctgttgttccacagtacgcagaccttcacgtacaccaaaatcaacaggagacagttgcagagcacgttctacaactttcaccagttgaggtttaacacctttaaggttgttaaggcttttttgactgaatttaaacataaatcacctcttgtaaaaataccctgtttgggtacacagggtatttatggtttaagaggttcgataattaataatcgtaaagatcaccgaagcattcttcaaattcacgtttacgtttcatctgttcttcttttcgctctttcatatcaggaggaagacggtcttcattgacttcatcaatgtaagcctgtgcatcctctttggtcaggaagaaagcatggaagttatatccgttgcgcccattcatactacggtcgtcaagagagaattgtgtgtgacagtcccagtcatcaaacagggtgatgcattttgcaaacagccctataccgcgattcatataagggaagccagtaacaatcatctttctacccatttccgccttttcgccgtccacgcagaatacttcatacatgatcgcacctggtttaacatctttcttaacagcacgtttttcaaaagcacttttcataatatattcctctcaattggtgtaactacagactactagtttattttctgaatgtcaacaaggtttatcgttttttgacggaaaagttagagtgaacaaacgatcatgaaggttgtcgatccgttcacaagcctgtttcagtatggttttatcaccatcatttgttgtttcaatgcatccaagttcatcggcgtcaatgttcactacatcgctcatcaatgaagcaaacacgttagcatcaggatgtaacagttcttcgatttcggccttcatgccgtcgtgttcagaaaggatatcaataatatcgcgggttaaatctccctggtacgggaaccctgtttctaaatgattaatgatcctttgtgctttcgtaatcataattttacctacaaaaaagcccctttcggggctagttaattagagttcacagcaacggcacacaccgtattttgtaaatggagcatcaccgctaacgtaggcccagaaatcacatgcttcttcggcagtatcgaagattgcggcatcatagaacccgtgggcttcgttaccgttctcatcgatgaaaaccggagtccagatattaggattgaagcaatcgtcaacaacaacccaaccttctttagctttcattgcttctttgttggcttcgatgtgagctaagatttcgttcatgatgtccatttttctctcctaaagtgtgtttcgtttcgacagggctatagtctcataaccccgtatctacgtcaacacttatttgaagcgaattgtactatttttgaaaaataatccagagcacaccgcaccttcaattttcacccctgtagggcttttagcaacgaaccctgttgcgtaggtgtctttctcatcacatgcgaaccaggcgtggcctgtgtacgtgatatcggtaaacccgttagcagtcagaatacgttcagcttctttctcatcggtgcatccagcttgtgctaaaacgacaataacgactaacaccaaagcaataatatatttcatgttaaactctttttaagttggttttactggcttcaatccagtaaacgggatcagaatagttaccgcacatacccagtaacacagttgtacatcctaaatgatcggaaggtctcaatccatcaggatgaaaaggcaattcgttaacaccgatactggtagcaaaaagagcacctccagtactgtaaaatgttttgatatgatcgtatgcatcatcaggccactgaaaacgataagttttattgtcaatggttactgtatacatatcatattccgtaaacaacggatcttttccttgtgttgccccatacagagcgccgcgccattcaaccagatttgcttcaatgtcgcttacacaaatttcattacccatacgcaaatcatgaaggatcccttcaatggtacgaatagccccactaagttcattagttaacatagagtttcctttaaatcggtttaatggttttcaggtgtagtttagcataagaagaaccaaatgagttaccattatgatcaaacttatgttcttcactcttccagtatttccccgatttcatcaagggtatacgcttcttacctgctgttatcgtttcaaccattccggtatgtgtaaaaatcatacaaatccctcttcttcaagcacttcccagatcagcttatcaaggtgcatcaggttccacataaccgagtcatacgaacccagcgagcgggagtaaatcactccccatgaacgataagccttttggaatgattcagcactgtattcatcgagcggcatatcgtcacccgaagcgatcagcagtttcagaaccatcaggctattgagcgcctttggcgtgaattcctgttcgcttaacttcatcgcgtaccgttcgatgatcgcgattgacttcggatctttaatacgcccatctgtacgacgcgttttaaacgcgctcattaattcatcgactacggcggtacacttcatatgcttcatccttttcctgtgcagacatccgattatagcggatctcttcgcgctgttcaacttctctcacggcttcggctttcttttcagcggtcagtatgtgatgtactacagcgtttcggattccccagagatattcaatcatctgcatatcttcaacggtgtgataacctttcatatcacattcaaatacaatttcatcgcgttctgccattgccacctgtgcggtagaaggacaaataaccattccagagtatttttcaatcaacgattccagtgtacgcggttttgttggaatgtcaatagataccggaaccattcgcatcgttgaatcattatgggattgataaatcatcagaatgtgatctccgcaaactgcattctacgctcaatcgcatggatagcgttatcacgctgttctttgttttcatatccagcccaggtaatcggggttgaacaaatcaggtgaaaagtgattgctgggtgtctcttcccttcaacgatgattgttgcatcatcttcgatccatgttacgtgatccagattcaccggatagtttcttacggtaacagtttcgccaaccataggcgtttttcggcccacttgatcaggaattcaggagaatctacaccatacgtgtaaccttctgcactcagttgaatacgagcacgggaaccataatcaacagaactttgttcaatgagaaacttgaccgcatcaagcagggctaaatcttcatgacttaccatgattccttctgcctttggaagatccacaacttcatcctgaatgagttcacggcgggttgtttcttccagtgtttcatgattctggatcatcgtttcgaccggatcctttgccacggctggtttgttttcacctacttcttccaaaaacatcaacatccatccaggaattttagtccggaaagaactttgtacttcactggtgcatgaatttcccagaatgtggatcgcgttgccatgcatatcaactttattgatatagataacgttctgctgttcctgtcggttactaccataagaaaggaagcggcgtaacgatgtgttatgaccatacttccctaaatcgatttcagccaggcaatcaatgatcccacggttagaaaccttgtaacgcttaccctgtttgaaaaataacgattcttccaggtgagtaggggtaaactcttcataaagaacatagaattctttaggaattttgcgctgaaccaagctcagtttacaattattagaaggaacaataacagcgtgaatgtttccttctgcgtcacacatagcttgcattacttgcggatagtaaagatggtctttcttgcaagtatagctatggatacgactctgccgttttttgaagtaccatttaccagtttcaaaaggcgctgttgtaaaattcattttgcattctcatacatagttaaaattgcttgcatatgttccggtgattgtggaacccctgcaaagttcactttcaaaaagaaattcaaccgatcttttatgttgcactcatcgagtccaagcgctggtaatgaaatgttttcaaaagcacgttgttcatgtctttccatttcaccccaaaacaaacgggaaccgttaggcatcggtattccaatttcattgttccagaatttcatgatagttgtcaagcgttgttttccgtcgatgacttctacccatcgagattcgttgaattcactatcaaccgcgatcgcaatgataccgcaaggaaacccagtaatcaaagtcttcatgaaagcatcttgctctttctgcttccacacgtagggccgctgataggacggattcagatccagatcgttgttcttgaaccaatgaatgtaactaccaaccatgatcgcatgatcgcgactttggaaagtttttaactcacgaatacggtttcttacaatttcgtctgtcattataaaatcaccatccagtatataatcgtaatcataaccgctacagtgaaacacattgcagcgtacacccgcgcattatgaacctgtgttttcaattctgcgatctcttgatccttttcgctttcaaactcttcgcgagtaccataatacccaggatcgttagcagttgccaatctaaccgcatctttttcaaccagcgttgcataaccgctttttatttgtgtcgccccgtaccatccaccccgatcgttgttaatgatcagatgatcgcctttttcgttatgctttgattcaccaacgacaataacccgcttaccattcataatatgatcctcaaaggggccgaagcccctattttgcgttcttctgtagataatctaacagatttccgctttgatgtaaatccaaaactttagaaaacttctctgcgtttctttcgtttgtgagttcgtcgaaatgccatacaccatcatcagctattaacgcgccaggtgatgaacctgtttctacatcacgggaaagcgcaagccccagagggtgtaagatttcgcggttaatgcgccaaacaaggcccatttcagatagagtattaaaatcgacgtatttcatattatgcctttggtttcacaccgtaggccaacataccaaaacgatgatcattatctgcatctttaaacagaacttcgttaccatcaatgcagatgacctttgcttccggatcgatgtatggaagcaaccacaaagggatcaggcgtaggccgctatgttcatcccagcgactgaaattgagttcttccagttcatcaagggaaagctcattaggatcgatataacggaaccatttggtatttttgaggcggtcggggaagtttacaatttcttcatagccgaattcagcactccatgaagagtaaatagtgacttcggatgctttggttaaaacagcatcgcgaattgatttgcagatatcgattaaagtcagttgattttccatgatatatttctcatcttgctaaaattttaggcagtagttgccccatcgttttacgtgcatgtgacggaatctgtgagatcgggacatatttaaaatcatccatttcacgtatagtccgtccgttcttaacgaaagttgatgcacaatagcattcttccgctactgggtaatcttgccctacatagaggaataaagcaaggttttttgttttcgtgtaatcgagaacacccaggctaaccaattcctccgcgaacacttcaaatcctgtttcttcgaagcattcgcggatcgccgcgtcaatatgagtttcgcccttttcaacatgccccttcggaatatcccaatggggcgtttcggtggcatggcccatcaacacggcaccatctttaataaagataatacccgctgatagttccatttattcacctgcaaaagcgttatcaaatgctttaagtgcgttgttagcgcgagcactggcttttgtcacaccagcagaaaggttttcgaagaaagtatgtttccacacttcacgacgactggattcatgctccagactgtttttgtgatcaccacgaatctgttcttccatgtcgtaacggtacagatcgagttctgcgtttaatttctgttctaatgcctgtgcaaatacatgttcaatattcattttgtatagcctatttcagatttaaggttttcgagggtggagtgataaacaacattcccttcgtgtcgagtataccatacttttccgttctggttacactcattcattactttttcatctaaaccagggatcggcttcatgctgggagaaaacgcgatagacatcatttgttctgcactatcagcaaacccacaagggaaaacagatccagttggtttatcaagatacatcaactctactttagccatagatttcttcgaaatcctcacaatcaggcaaatacgtttcacagaaggtgcaaagcgtaaagaatgcaggttgacgaataccaggattatccggtagatacatccagaaggtgttagcaaacacgatgaatgttttcaggttttcggtggtaatttcgctaacaccatcatacccggattgattgatcgcgcgttgcagcggcacctcatactgttcgcaatagtcggcataatgatcgcttgttaccaggctattagccattttaatcaaatcaacgattttcatgattttacatattccactttaacaggttttgcaacaaatttatctttggtgcgcccatgaccattacacaggtcacattctttgttgaaatctttcatatcttcgacccatccagaatctggcaacccagacggatatgcgttataacgaatggtttcataaccttttccgttgcatttcgggcaaacatgaggacgttcatttttagcagactctgccagttcgcgaagggtagtagaactaccataagcccgacacatgttttcaaagtcttttaaagtcatgttataaacatcgatgacgttatattttttgccggatggtttagccataatatatttctcacttaaagaattttttgatgaaagagatagcaaggccgataccaaagaaaattaagtaaccttttccgtcaccgtgcgccaaaacatagagtgagctgccgtatgcgatgagttctgcgatgttcattaagtttctcatgatatcctcctttttctatattaagtatcttaccataatataaaccaaagtcaacaacaaagttttatcaacccacttatcaccagtcattagtaatcccctacaccgcaacactcaggatcttgaaagtgcaattgttccactcacaatacgtttttgcacagtgaacacttcctttcataacaaacccgtttgagaaaattaaccagtaaagtttcatgatagcctcctttgtttcgacaaggccaatataacaaagcccctgcacgaatgcaagggcttttttcaatttttcagcatccaaagttgcggaggacaatctttagaagcgattagacgatccaggcgggacataacccgacgataaccgtcgtattcaaaattaatttttggtggaacgtagttgacctggattgtttttctgttagctaaagaaacatactcagggatcaccgttcgtaaccgtatagcgatcactggcttctcttcgccttcgttaaagaacatttgaacagttataggacaagcaaagattttaccatttacccgacgataaacaataacttcctgtgtcccttctgttttggccttcacagcgtaggttagaacataacacgaataatgatttgctagactcatcatgatatcgcgataagtttcaatatcttttttaatcgatactgaacggtctttaaagcgatctgaaatgtggtcagcagtagccgctaccttgattgtataccagtcacctaacgcgctagtaaacgcctcgctaacttcttttcgtacactgttaacaagatacattaaacgtgttctgttcatataatcctcactgatttttgaagtattcgatctgacgcaaacgcttttcagcggcggctttcgaattgtattcaccaagttcttttgtgcgatcgtgattcaaaacaacccacttatcgccacgctgttcaatgtgttctgtaatatcttttaacgacttatccagatccagtgattcagcctcttcacagataatagtcaaatccacgggcagtgtcaacaaccttttcactccgctgatatcatcaagcatcgaatcgtatgcaagggttacgtgcggcttgtaatccggataatcgtatgttgcgccagcatcaatagaatctttgaaacggctatgcaggtattcagattccaggatccctacaatagtgctaccgtattttgtgtcccacttttcaacatcaaccagtttagcaggttctgtgatgtcctgttgcgggaacaaatcaaccgttttccggctgtatacgatcgttgtatgcatcttttcggctgaaacagcattctttgtgatacctaatgtcttttgaacatttttcaaagcctcacatgaagcctgatcgaatttagcacacatgtagataccaggatctacaacaggttttgtgatttcaagaaatgatttcataaaacaccccaataaaaaaggggccgtagcccctttgtaataaatttgtttttacgcttcttcgccaaaggcggcttcatcttccgcgactttttcgacttcaacggaagggatcagagcggataccgcgccaattaccgcttctggggttactggctggcttgcgtcaatacccagtaccgaacacaggtcggacagaagttgacgatgaacagagagttcactttctttttgcgcgataacttcgttcagatcgaatgcgcggcctttcagtaccagtacttcattttgcagtttttgaatatcagacattttattacccattgttaaaatttaaaagtatcgagcactttgctctttagttgtttcaaagtaccttcgttagtgatgatactatctccaggttgaggtgtcaaacctttttccgtggaatgttcatcaacaattccggtatcctttacaataaacacaaacttagcacctaagcgttttaggtatttgtattcgtgttcttgacgacagtcagtgaccagaagatggttgtattcgtcaccagtatatttattgacgaatctttccaacgtgtaacgaacccaaaccgtgttatcatacttgcatacgatatcagttccaaacacttgcatcaagcgtctgatactccagggagtatcgttactcataatcaggttatcaatatcatcaggactataaacaatattgtatccacgttctttgaggatttcaagcccgattttgaaaatatttagaacatcttcattagacatcacaagaggtttctctcgatcgcctttgtaaaaaatagcatccggatcagaatattgtccttcaatcatattgcgaatgtatggtttatcgtaaccatatcgctgcattgctattcttagcgttcttttgataccaaatgccagtgcttcacactgaacatcattgtacgcctcttgaataaatttagcaaccgtatctttaccagttcgcttttttccactaatcacataaatcattagctcattctcttttgagaagtgactacttttccgtcaatttcaacttccatatgaaggaagccaaaagttgccatacacgtaaccgcttcatcactatcgttagtataacccaattcaacctcacccaagtttgttgggaaggcaccataaaatctaaatgtggcgatcgttttcatctgggagttatccaggatatgcacagcgaatgattgcttaggatcatcccacgcaacagagttaaactcgttgtaatcgtttgtgctcaacatccatatgtaaatcccaagatacgatctcatttcctcatcgactacaaagcggatcatcaaaggatcaaactcaaaagccgaaccaggtactttacctcgaaccatcatatttgcaggaatatcaactgctgggaggttcattgatggtagtgtaaccccttgaacttgtaaagtcaaacctttcatgtaactgttatcaggaatatcaacccgaaagtttgtaggtgagatttggtttaaaatcatttctgtagacataggatctcctttcctctatttagcggggaacgggatcaaagcggcctgacggggtaatataaaaatttgaagaaaatgcttgaccttttaaaatctttgatctataataattattaattaaaattttatcaaaaagatctaacaagatcaagtaaaatttaataaataatttatcaaaaatttttagatctgatcttgaattcataaattttatgatctataatatattaatattttattttatcataaatttttatgaagatcaatacttagatctaataaattttatgctttttctgaaaacttttcctttaccccgtcactaaatactggtactatgttcccatattggaaatcaggaaaaacaaaatgactcacttgaagaaattcaaagaatttctgaccgaaggtaaaaccctcgctcgtaccgtagcacgtggtcaacgcgctaaaacttccgataaacattcaatcggttttcttcacttcaaacatggttctgatttcgaagttttagcaccggattctcacgatctggcatacttcggtaaaaacattgtacgtttgaaaggtatgactactggtaaagttcaagcggcttatgtcgattgggctaaaggtactgtttctttctacagtggcaatccggatgatgatctggatttcgacaaaccagaaaaattcaaagctgctactctgtatgaagaggcggaagaaaatctggatctgtataaccagttagcagaagatttcgaaatcgagatccctatggatgaagctctggtgaaaggtaaagtttacaaactcccaagcaacgatatgcgtcttctgtacactgggcgttctaaaactaaagcaagcggtgaatatgcagtgtttaccgtagttgatgcttccggcaaacctcgcctagtatctggtaaaaaattcacccaagaatataaaggcgatatggtttctaaactggttctggctgaatccgaagatctgaatgaagcggctaaaggcattcgcgaaaaagttattgctgtgatggtgaaacgcgggtttaacgaaaaagatgcagaaaagatggttgacaaaaacctgaaagatgctatgaaagttagacctggtgcgacccctggcaaacttgcagaaatagttagcaccctgtaaaaataaagccccttcctttcggttggggctttttgattagtatttgctccagacttttttcgcgccgtaaggtttccctttggacataaattgctgagtcggtagccaaacagctttcgcccaatctttaggggcaatctctgctaatggtgatttgaggtgtgatggtagatatgctttgatcatttctgttgcgcctcgcatacctttcacgttaccccagttaattttgagtacagtcttgttagagaggcgtttagtggatccgtaccctcgcttcaataactcttctaaaaactcctgtcgtgctctgggtggcgcatagtgcaagttcaaaccatagaacactaagttacccgctttcgatcttccggatcctaagaaaatgatcagtggaaatctatcccaataaggcagggtgtctttatattttgcatcatatgcaaacgtgtacaggcgacccgttgctggttttgccacacggtgtgttttgatactggttttgatgaaattaccaaaccattctgttgaatctttctgtcgctttgctgctgatacaccaacagtgatctttttcagactattacggaaatcgttgatgatctcgatcccgtgttttttacggtagtcattacgttttttacgggcttctgtctctgcggaacgtcgttcaatctcatcatcgatctgttttttgtaacgatgcattgactttgtgaacgttgcgtagtttaatccctcagaatcggcaaaacgtttagcagaaacacctttcgtttttgccttgcggaatttgatccccagttcaacccaatcactcaatttgcgtttgggtggtgcttttggtttatcctcttccgcgatgatctcaaactcaaaaataaaactcatgtttccctccagggattactgacctcgccacccaaaaacttttttgagtgattcttctgttacgattttgaactgccagcctttttgacggcatagctcatttgcggctttccacttatcaatattaactgtataggtgtaaagagcatcaataaatttctttttattgtgtacgttgttgtttactggcttcggtgggggcatggtttctttaaggggtttaacctcccaaagatatgtagtaccattttccatttccacatagaaatccatgtaatagcgtcttctcttaccgtctgcattgcagaaatacgggatcactatacattcagaattccaacgttttacgtgtgggtttttatccagccacttcataacgtagcgctcccacgatgacctatacgtaatctttcgcggatcgcctttatacttctgtatgttttcgggtacaaacgaccctttatacgtctgtcttccagccattgcgtaaatcctaaatagaataatataacgtttagataggggaacttatcgtgctattttcatacttcccgcctgttgattacaaaggcacccagacaactgatattttccgagactatcgattttattttaatcgtgtgattggaaaatataaaacccgtagttaccagataacaggcacactacgacctgaacaacttgcagaatcattatatggaaaccagcaatactactggatcctgttgatgcttaactctgtttatgaccctttctatggttggatctccgatcaggaagccgcgtatcagtgcgctatacagcgttattctgaggttggcggtgaacaggttctgtatcatgtagatgaaaacaacaacaagtattataaccttgtcgaagaccccaataaccctggtcattggtatgacaaaggtgacaaaccaatgctgtatttacagtatcaaggtgtattagctcctgtagatatttatgaagatgcagtgttgcaaaatgaagcaaaacgaacaataaaaatcattagtccgtctgacatccaggcgtttctgaatgattttattaaagaaatggaaaaggctaactcatgaaattaggcggaaatttacactcccctttctttgatggggtggttgaaaacgttgatgatccgcgcgggttgggccgtgttcaagtccgtgtatttggacaacacccagcccaaaaacaaaaatccgatgcgatcggtgttcctgttgaagatttaccctggatgatgcctattcaggatattagaagcgctgcgatctctggtgtgggcttctctccaactggtatcactcgcggatcctttgttgttggttattggcgtgacaaatggcaccaagatggtatgataatcggtactgtcgctggtgaatatgtcgaacaaccagacacacagaaaggtttttgcgatcctatgggtgaataccctcgctatgttggtaacgatgttaactcccttgctttaggtggtttgaaaggcaaaggatcatcaagtgtcatcattcgtgattcaaacacaagcatagcagtaaacccagacgatcgcccactggatgagataccagaagataaccgccctgatacgggtggatttacgatcgaaaagatgctcaagcaggatgaggggatccgcacacgctggtatacagacagtgaaggatatccgacaattgggatcgggcatttgcttatccgcgaaaagactcgcgacactgcaaaaattaacgctgcgatcagtaaagcggtaggtcgagaagtaacaaacgggacaatcacggcagaagaggtttcaaccttatttgctcaagatttagccaaagtaagatctgatattcagagaaccgctaacgtccgtgaagtgtatgtgaacctaaaccgtcctcgtcaaatggcgatcgaaaacatgtcgtttcaaatgggcgtcggtggtgttgctaaattcaccaataccctaaaagcgatgaaaaatgaagattggcaagcggcttataatggtcttcgcaattcactgtgggctagtcaaactccaggccgttcttctcgcgtgtctaaaatcgtcctcacgggcaaccttgaatcatatggggtgcaagtaccagatccggaagggcgctctctgagtgctgcttacgctgcgtataacggtgctacattgtcggctactagtccggaagatccgtttactcctggtgatacccgtgtgatgtttgaagaaccagcatcatcttataatgcggaatatccgtataacatggtgtttgaatcgagatccggacacattcaggaattcgatgataccccaggatacgaacgatataaccgtgttcacccagcagggagttacgaagaaattcgcccggatggaacccgcgttgttaaaatcgtaggggatgattatcaaattgtgatgcagggccggaaactcaatgttaaaggcaacttgcaggtagttattgaaggcgacgcattcatttacaacatgggtaacgttcaacaaacggttgatggtaacgtaactgagtttgttcgtggcaacgttcaacaaactgttgaaggtgagtacgttggcctgattaaaggtaacgctgaactaactgtaaacaaagatgcaacagttaacgttgatcagaatcttaccgcaaatgtgaaacagaatgcaaccgtagctgtaacagaagacgcaacgatcactgcaaaaaatgcgaaaatggagattgaagaaacgatggatatcggtgctaaagatatcaatatcaaagcaacgaataacacgtttattgattctggcgcattaacaaaaatcactggcggcaccgtccaagtggggtaattaaatgattatggattatgaatcaataattgatggaattatgcaaaattatcagcatccttgtgatgctgagatccccgctggctattatcggcgggttatctggcaagggcatacagaaaattatccggctgttggggttgagtgggataccgagataatcaaaatcggtactcatctttatactcaagaaccgttcggacatagaagcacggatctacctgttgtcaattcaccgggaacagatccaaataccggacaaccaacagggatccttgttccgaagattggctattatttcaacactcaagcagagattgatgcttacattacatccatcggtgcaactaaaatcaatggtggtaatgattggtacggcgcggatctgtcaaaatcaaacctatacaaaaaccctggcgaactggctatgtataaggttgaaaacagtggcgggtatctttccggaacaaaccctgtatgtgatgctcgcatacgtcaggcgtataatcaggacactggcgcattcaccaatattgattattattggaatggtaatcgtatagcatatatgaagcatgacgaaacaggggcgcaccagtgcaaatatacgggtatgcaggttaacaccaacgcagatacaagcattcctcctgttcctcctgcaatgccttccacttatggagcattaccgagtgaattaagccgtgctgatatttcgtgcattccggcaactgttggtttcgcatatacaaatatcagtgatgctatgttacaggcatggaacgaaacccgtaatacgttcaagctacagtttaacatgttaacgggtgctgtacagaatggattcgggatcgcgacgatgtttgacgggttatccgtatcgatggaagaagtaatggcgggggcgctcgcattgtcacagcaagcatggcaaactgctatgaaagttttcagacaagtgattagcgctgcgtttaacattatcggtggtgcatggggattgattaatcagttcttgcctcaagtaaccatcttaggtgttgcgatcaacatttacgatctggtgtttggtgataattctgttcagactttgaaagatgcatttaatgcaatcatcaaatccggacaacaaacatatgaaaccgtcataaacgcaatatacggggccataggaagcgcatacaattactctgtggaatatgtcaaagctggcgctcgcgaccttgtggatgcgtgtagcgcgttatttgattggtgtttaacgatgttccaaaacggttgcgttgcattaatcgacttatacggtcggatcatgcaaacatgggctatccctccggaagttccaaacccgttatggtctgcggtgctggctatccgtaacatcatgatgcaaatcaaaccacttgatataattctgggcggtaacttccccggattcactgcaatggatttgtatcaacaagcacaggaaaaagtcaaggcttttattgatgagtcatacgaacagatccgagggctttatgaacaagggcaggaactttacaaaacgttaaaaaatcagattttcgaacgtgatgcaattcagagaaaattcaaccagtacttaaactggatgtggggcgctgtaacagacgaagcaacagcggcttatcaatctgcattggatgctgcaaacgctgctgtagctgcaacacaggccgcgtatgacgctatacaggaacagattggatctctacaagacgcaatgaaagatacatacagcatggcgatggaagaattaaagaaattgcctttgatgagtacaataaacgagtttttaggcttctgtggtgtcgcatttgatgatcttctcaagtcatatgaaaatgcgattactggtgctcagtctctgtacaaaaatttcattgatagttcgcgctcgtttaaagatcactgcaaagtaatctataaccaaatttgtacgttggcgttgagtaaagtcacacaatatgtgaataaattgctgtctctcataggattagcaatcaacttcggttcgattagtgtatgtgttccagtactgaaatactaaatagtcgaatgatcaagaggaatttataataatggctactgctaagactaagactgtcaaaaaacagattaaccaaatccccgatatctttatcgggggtactttcgaagaaattaaaacagatctgattgattggctgggtggacaagaagagtttaaggattacgatttttccggctcgcgaatgaacgtactgatcgaccttctgtcgtatgctactctttatattcagcagatgggtaacacggctctatttgaatcgtttattcgcacggctgcattgcgtagttctgttgtacagtctgctcaagaactggggtatatgccagattcgcgcacggctgcaagcacagcagtaatgattacggctgctaacccactgaccccaacatcgatccgtatcccgcgcggtacaaaattcatcggtactgtaaagaatacagacagttattcttttgttgtatcggatgacgttgttatcgttcgtgatagtaataacaactatacatcaatgctgaacctggtgcaaggccgtttagttcgtactgaactaatttatgacggttcaagtatcctgatccgagatccaaacattgaccgtagtcaggtacgtttaactgtaaacggcgcacaatgggaagactggacaaacgaaagcattgtaaacgcaacaggcgcaagcacgatttactacatgcgtgaaactgttgatggacataccgaagtttatttcggtgaaggtgaagcaagtcaacaagtggcgggtggcgcactaaccgccgaatatatcgggggcttgaaacctgctaatggttcgactatcgttattgaatatctgtcaaccgatggggaagcggctaacggtgcaaaagattttatctatgtcgatacattaaccaatattagcatcacggcgattaaagagaacccaaccaacacccctgattatgtcggtgctgatggtggtggtgatccagaagatatcgagcgtattcgagaactggcccctgttatgcgtgaaacacaacgccgttgtgtaactgcatcggattatgaatccttcctgtctcacaggtttggatctatcatccaggcggtacagtgctttactgataacgaaaaacccggttatgctttcatttctgttaaaccaaagtcaggtttgcgcctaacatcggtacagaaagaagatatgcaaacgtatctttcgaaatataacctcgcgacgatcaccccgtcgattatggatcctaactatctgtatattgtgcaatctgtaaaagtaacgtatgatatcagtaagttgacggaatcagaggaatggttacgcggtcaggttatttcgtcgatcgactcttactatactgacaacgttgaaattttcaacaaatctttcagtgtatctaagatgttgacttatgtcgatcagtctgatacctctattatcggttcggaagcagatattaaattgctccgcgaaattgacaactattacagtgctcctatgtctgggatccatttcttgaaccaggtggaatcgaaatcaatcatttccagtacgttcaagttcaccaacgaagaagacgaaagttatgatgttcgttatgcttctacggaaatggatcaggatggtaacgcaaaaattgtaataggcccgttcaaggatggggatatttcgatcgctgcttatacaggtgatgactttgaaaaattaacagatgcaggaacccgtaataaatattacgaagtcggatcggtgtctcattataccgatttcattagctttgatctgggcgttctgaacgtatccgccgatagtttcagtgctgcttatatcgagctaaccgcaaagcctctcgaagaaaccatttttactcgcgatggatcgttgatcgtgtttgaaaatgacctgcgtcctcaatacaccacattgactatgaatcctatcagtcaataatcgttaacccctgtcttcggataggggtttttctttttataaatacgtgatatacataaccgcaaatttggagaaatataatgattaaagcgccttcgattacgagtttgcgcgttgataagctggctgctaacttcgtttaccttaaatgggatgatgttggcatggatttctattatgtggttgaattggcccgtagccgtgatatggacggaactattattccagacgaagagttaatctggacgcagttgggttatagctacgaaaacgaatggtttagcgatcaggttgccccaaatacacgttataaattccgtattcaaacaactcatgaagggtttgaaccttctgattgggtgatcagcgatgaattatggacgtttgatgagaacgcctacgcatatacaaccatgcgtgaattcacccctgctgattcgtttatcaatgaaaaattcgccaaaaacaatcgtgattacgtcgattttaacgatgatgttattatggcttctctgatggttgaggattttgtatactctcccctgtattctgatgtaagccagatcagcgataagatcctgaaacaagaaagctaccatgaaattcaagatcacatcgaacacgtttgtaatgatatagatcgcacgttcctggtatactcaaacggattgctttacctgtttgaacgttttcagaatatggctaaagtgtcaaatgacaaaggccaaacgtggtattactacaaagcattaaacgatcgtgtaggcaatccggtttcccgtaccgttgcttatcagagcgctaacactacgtatgtgttaggatacgatcgcatattttacgggcgcacgtcaacagatattcgttggtcttctgatgaagttcgtttttcttctgatgatgtaacgtttgcgaagctggggaaccagtcagggttagattttgatgttgattcatacaacacatatgcgcgtctaccgggaggagtgtcgaagtatgccgaagctatagcttgttctaatgaatggctctacgtggctgctaagaacgttatgcgccgtattgcgttacgtaacacaccaattgatactgatcctggttcgccgacctttggtgaacgtatttttgatgaagtttcatataccatcgtaccaggaaatgataaaattgttgttaaaaaaatggacgtgctgaatgaccgtctatacgttctggtaactggtgaagttaaaacggcgatgatggatccgactgtcaaagctaacgtgatcccatcaaacgatgctggcgtttatctgtgggatgagaatgcaaagacgtttacccgtgtttatggtaaaaccgaagatgaacgtttttatatcactcatgaatataccaatatgtcaaccaatggcgatgaagtttacatttctgttggtaactacaaatatccaggcactttgccagatccagatctggttgaaaagtatccggaagatgtgcattcagcggtgaaatacgatcttgttcctggttatactgcgagcatttcgattaactttgctacagttcgtgcaaatcagaacgatcctacagtatggaactttgggccgcaagagtactacaatgaagcaaactttagctggcatttccgcgataaggttagcacatggatcaccaatgataaccgtcctctggtggtttatccggaaaccctgtatactctggttactgatagcgcgtctcctgcgtcaacgattcgtgtaaaccatgaagtttgggacaaaggaacagttactatctacttgaataatatcaagtttactggttttacgaagtacacaaacggtgttctgttgtatcgctcaggtggtaggataattggattctatgaactgtcataccgcgcaagggatgaactcactattttctggaaacccgataacactttaatggtggcaagtctggttaatcaggaacgtgaaaacccatatacgccggatattgaacctggattaatcgaccctgatctgagtcacatgatcactcgttttgctccgcaaagctatctggacaaccaacagttcgaaaaatttggtgaatactatctgcaatacatttcgttgggaagcaacagttactataacaaattgctgaacctcatccggaacaagtatccgagagagaaaaacaacgttgaatatttgtggtctgaaatcaaccgccgtaacatttacctggataaaaccaaacgtgaggcagtggttagatttttcgaatcacgtgcaagtgatttctattcaacaaaagggatcgaagcaagttatacgttcctgtttaaattgctgtataacgaagatgtttccgttgagatcgaaagctccaacagtctcgaatatgatattttggttagttcaacaaatatcagtcaggatatcgtaggccggacgatctatacaccaactggacgcgctaacgttacatacatcgaacgtgactatgaaaatggtcaattgcgttggtcaatgactctgcataatgctcaaggtaactttatcgaagggcaggttgtcaagtcagaaaaaaccaatttcaccggaatggtaattcgtggtgttcgcggtaaacaaatggctaacaactcgatcgactatatcaaccgtggacgatcttactatgtgatgaaaattcgttcaaatctaccgacttcccgttataaggatgacgtattgaggtttgttcatccggtaggattcggctttatgggtattacgatgttaacagtattcatcaactctggtttgtcaatgactcataacgagacaatcattgatattctgagaaactaccgcttcgatagtggttatcctaagttctggcctgatcgcattgcgagtatggacggtaacggaaaccaacaattcgacctggttactggtgaacctctgtacaccgtacacccgcgagcgggggaaccttttgatgtacctccggaatatgacattgaagaaaaaccgcttaacggtgttcttccttctgcgcgacggttcgatcaaagtccgttgttcgattgctcaggcgttaaatattcacagttccgtaatttggtggataaacgactgaaagatgatgcaggaaacccacgtgatccaaatcctccatcacagattaaggtaggaaattaaatggcacaacaaaacttgtatcggtcggtaattactgcaaaattccgaaccgaaaacttgatgaacttcaaagatatgatcggcgatgccgccgatctaaacacgatttacatgtctattggacgaactgaatcgtggtcggataacgaatccgaccctaacttcgcccctccatatccaaatgatagcaccgatggtgttagtgatatgtggacgcatatgatcggggctactaaagttcctggtgatatgatagatgcaattttaccacgtaaagactggggtgatactcgttatccaaacccgaaaatcttttactttaacgatattgttgttgtaaacaccgcaccttataaccgtactgatccgggtaaaggttggatggtttatcgtgtagtcgatgttcctgatatcggttcttgctccatttcgagcattaccggaaaacttgaatgtatcaggatcggcggtatctggagtccgtctcatgaatctagtgaacctccacgcggagaagctaacgggatcgacatgggcgacggttataaatgggaatacctctacacaatcccgccagatgtcgtgatcaaccgctgtacaaacgaacatatcgtagttcctttccctggcgaactggaagaggatccggtacgttggggttatgataacgtgattcaatggtatccaggacaatacgatctagtgtatcggttgaaggtgaattcaatgcgttttcgtgcatacatggattctcttttcttcccgcaatctacgcttcctggtaacaaagggttccgtcagataagtattattgtaaacccgttgattaaaaaggcaagcccgaccgagcctgaaaagaaagcaactggtgattactataatgctaacgcgcttgaacctgattccggacgtatgatttacatggaaaacagacaacctattattcgctcccttgatcagactgaggaagtgagtattgtattcgaattctaaggaaaaacaatggcttaccaaacagcaaaaaaactaattgatgtcggtgaaatcggcaacccatcaacaggcgacccgctttatgatggtggtgttaaactgaacgaaatgatcaccaacgtttataatgcgtttggtgatgtgcgtatgctgtctgcaaacgaaggtgtcggtaacatggtgatccatgctaccggatactatcagaaactaccacgcacttactattcaagcacaccgatcgaactgggttccctgcatgacatagatacttcaacaggttcgattaccgttgttcttccttctggtaaggttggcgaaggttgctacttcataaatagtacgggtagtgtctctgttgatcgtcctatcgcgtttcgtcctcaagttggggatactatcgcgggggttgcagaccagttgtatatcacgtcaccttacacctttgtaaaaatctggtgtaccaaaaaagaaggtgcggtaacaaaatgggattattctgtagaatctatgttcggttctaaaacgatgcctgttgacactacggcgcttgtactgaaagcaaacccgactgctattcctatgttcggatatagcgaatttagcggggctaaggtgcttgtatacgcagaaaacttagctggtacagttaccaaaatggcagaagttttaatgaccgtggatcgtgtacacaaaacgatttattcaacggaatacgctattttgaaaaacagtgaagatgaaatgtttacattaaactttactgtcggtgctggtgatgtcgtatacgctaacgtgcaagcgatcaaagaagatcgaattaaattcacgattaaagcaatagatacgattaaatcagggatcgcgtcatgaaacaagaaattttaataggtcagattgtagacgatggtacaggcgattacctgcgtcgaggtggtcaaaagactaacaacaactttacagaattgtataacatgctgggggatggtgagatcccccatccagcaggtgcctggaaaacttttgcgggtacgacgctatcaccaaaatttggtgaatcatgggcgttgaataccagtgcaaacaaaatcaccgtaaacctcccgaaaggcggcgtaggcgattataacaaggttattcgtctgcgtgatgtgtggtcgcgttgggctaccaacaacgttagactgatccccgcaactggtgatactatcaaaggttccccaactcctaaagatctgtttaaagattttatggatgtggaattggtgtattgttctccgggccgttgggaatacgtcgaaaacaaacagattgacaaaatcacaacttcggatctggcaacagtagcaaaagaaacgtatattgctactcagggacaaactgacttccctaacgtattcggtgttggtaatgaatacaacctgcaatcgttcgaagtttactatcgcggtaacttgctgttcatcgatgagaaagacggattcaatgctgataactcagactatggatcgattggctctgctcctggtgaactggttgcacttgatggtaattcagtacgccttaaaaacccgtgtaacgctggtgatacgcttcaatttgttacctatctagatgggttagcaacatggcgatcgagctatgaagcgtatgtgatgcgcatgtatcagactggtgatacttctctggaaaccgttcctggtgaacagtgggtaggcgatctgacaaccaaaaaagagtttacacctgctgaatttggtgttaaccctcgcgtgttgattaaccctaactcgtttgaactgcttctcaacggtaaacaactggttaaaggcggtgacgctgactatccggcgttttcctgtgaaggtgcggaaggtgttgatgaaagtacgtgtgttggtaactctggtgtatgggttccgtcaggacaggattatagtttagtattcactgattctgtagtgacttcaatcaagtttgctcaggaactggaatccggcgacgttgtaacgatccgttggtttaacaatgatattggtactctgatggattgggaaggaactggcggtattaaagaaaaagctgataaggtttatctcaataacgaagaagaagttatattgacgaaccgtatcgaatataccgattataataacccttctcagaaaacaatgcgtaatacaggggaaacctatcagggacgtattctggatattcaggctatgtttgatattatccacccgatcggaaccatctatgaaaacgcacacaacccagcaaaccctgctgattatatgggatttggtggttggaaacgttacgcagaaggttatttcctggctggctggacatcaaatgcagcggatcctgatttcgcattaaacaataatgatttagatagtggtggtcaaccgagtcatacggcaggtggtactggtggcgatcgtggtacagaaattaaaatcatcaacgttcctgaacttgtatcaaaagataaagttctgattgctgatgaaaatggtgctgtgatcattggtggttgtcagttagatcctgatgcttctggccctggatacactaaataccgtgaggatacattgaaagtgaatcagggtaacacattacctgataaaatcaaaactattccaccgtatatgactgcacatcgctggataagggttgcataatggcttacaacaatatttcaaaaacaagggagggcgctcgcgtcctctctaaagaagcagattacttacagtatgatacttatggtaagttgcctctgatcggcggtaaacgttcgatcggagaaccaaacattgaccaaacaaaacgcggtgttctgtatggaaacgtacaatccgcaattgatgacctgtatacgcttatcgagcaaatcccgattaacggcgttgttaccatgactgaggatgcacctccaatcgccgtacagcaggttgagagcgtttcttttgatggtattgtacagaacatcgattcagaccaagaacaggctgtagttcacgtatacggcttccctttcatctttgataatgggactaacgccgcaaccgtttgtgaaactgcatacaacaaatttactgaattcgttgcagcggaaaaatatttcgcagaagttaaccgcaaaggtgttgatggtacgatccttgaatgtcgatttattgatagtgttccgcacccggcaacaaatatctcagaaaacggtattcgtcaaatcggaactatcgacgtagccgcaaaaaatggctatggttcatgggttaagttgggttctggtttcttacctgatgttactccgcaagtaaccgtgtattacttcaaacgaattgcataaggataacacatgagtaacaatacaatcaaccacgtaagtgataaatccatttacgtgacatttgacccaacaggtactgattggcctgataccataaccaacgtacaagatgcgttggaaaaaataggtagttgggcgcgtactgatactgggcttcctatcgcaacaacttctgttcgtggtattgctcagatcgcaaccgaagctgatattgacgctggcacggataacaataagattgttactccgaaactgttagcatatcgtatgcagaaccctaaagcatcacaaactgtatggggttatacgaagtattcgactgatgcggaatctacaaccttaactaacgatgcatcgtctattactccgcgatctctgaactatgtgttcaataaccgtaaaggtacagaatcggtttggggttcttctaaaattgccaccactgcacaggcggttgctggtacagataacactgtaactatgactccgcttaaagtcaagcaagcgatcgcgtccctggttccggttcagtcaagcgcgaccgaaagctcgcaaggtttggtacaactggcaacagttgcacaggttcaggctggtacgatccgtgaagggtatgcaatttcaccttatacgtttattcgtttaactgcaactgaaagcaacctgggcgttattcgtatcgcatcacaggcagaagcaaacgcgggtactgatgacaccaaagcgattactgcgaaaaaattaatcaatacccgtgcaactggatctcagttcggtgttgtcaaattagcaacaactgttggttatgtggcaaacactgcactttcttcaaacgctgcggtattacctagtgatcgaaatgcggtaattaacggttctctttatgagaatagcgcaatatataacaacaaatatcagacatggacagatcttgattggcatttcccagtaggtgctattgtcatgactggttttcagactgaccacggtagtttgtatatttgtgatggtcgctcactgaataaaaataactatccgttactttttgagcgtataggttatacatttggtggtggcggtgattggtttaaccttccagattgtcgaggcgttgcagtacgtggtcatgaccgtgggcgtggactaaaccctaatcgtgggtatggtacatatgaaggcgatatgttgggctggcatgaacacccattacagcttatctaccagaacggcggtaatattcctaaatggcaagcagtttacgaactgaaaagcgccgaaaagaatgaccaaagcgctcgcgtatttgatgcttctataactaaagccactggtgtgggtggggaagaaacccgcatgaaaaacatcgcattaaactacgtaattcgtactcaatagaggttattaaatgatcatcgacaaattaaacccgttgccgaagatcccgtttgttgatggcgtcccagatgacgccacgactcaaacgaagattatttggatcaaaaacggtgaaactctggacggttcgccagataaagtgtcaaacactggtagtcttaaccgaactggtgtaaacatccagcagaacgcggttcagttagaacaaaataccatcacccataatgataaaatcaacgaagtaatcgatcaggttaacttgattactgaaaacattgatgctattggtgatgagagcgtaatcaaaaaagttaaccagttggatcaggatgttcgggcattaactttatctaacacccaaacacagaacaaggtagcacagttaaccctttctgtaaatgctcaaaacgatgaaattggtgaatacgatccagaaaaagatcctaaacaccgcacaattcgtaatgatatcatttacattaagaaagaagttggttcatatcctggatttaacgttgatggtgatgttgacccctcttctactggtactggccttaaataccgcgtactgagtaaccaacgtgctatttctatgcaggaaactcgcataaccaaactggaagatgattgggcgctttccgaagtaggacaactgacagaagaggtaaaagaacttcgtgctgaaatgggtgattctggtcttgccacaacccgatcaatctatgcgcgaatcaagatccttgaggatggttctattgtaatgcaaaatgaacttgatgcgattaatagttatatcggtcgcacgtcaggttcaaccagttccattaacgatcgtgtgaacagtatggaaaactccgttagttctctggctacacaaatcaacgatccggtaactggtatcactgcacaaattacaaccatcaatggtcaaattggtacggtttctgttcagggtagtatccgttatgatattgcggaaaacaaacgcagattgatggatatggaaatgattctgggtgaatccggtgatgaaggattgcagggacaagttgcgatcttaactggcgacattggcgaagattcagatcctaccagtatcaaaggccgtttgagtgttgttgagggtgaattacgcaccaacactagcgcactatgggaactgcaaggcgttgtaggtaactcttctagtggcctcgttgcaactagccagcaggttaacaaagaaatatatggtgatggtgttagtgccgaccccgttactcgtgctggtttgaaaacgacaacccgcaacctgttcactcaggtaggcgataacgcagaaggtaacgaaactggcatttatgcactgattgccgaccttaataaacgtgttgaggatttagaagcgttgaacattgcacaggcacttgcagatcgcgtaactatcgaagatctgaatgctaaactggctctgtacatcaaagaagctgacgctgatctccgttatgagagcaaaaacccgcctctgtcattcggtactaacctaactggtgatactgaatatactactggcgatccattgtctctaagcgtaactatgactggtggtgtttctccgctgtcttatcagtggacgaagaacggcgtaaatgttggtactaatgctaacacatttaccattgattcgctacagccttctgattccggaacttacaaagtaacggtaactgatgcaagccataaagtcatcgtttctgatgaactggcgatcactgtcgcttaacgattaacaaggggcttcggccccttttgaggatctttatgattacgaacaacccagcacaattaaaagatgaaattctgcgccgtttaggtgctccgatcgtcaaaatcgaagtgacaacagatcaggtttatgactgcattcaacgagcattagacctatatgcagaatatcattacaatggatctaacaaagggtatatcattcttaccctggggccggataacccgaaaaatattttcgatctgagtaaagaacacattttcgcaattactaaagtgttgcgtactaacatgggttcccttgtatcgatggatggtactgcggtttatccgtggtttactgatttcctgatgggccttactggtggttctctgggcggtggtggttgtgcatcacgtacctacggaatgaacgcatatggcgcggatatgggctattttacccagatgatgagctatcagcggtcaatgcaagatctcctgtctccgcttccggattactggtataacgacgacacaggacagtttgcagtatacggaaccgttaaagatggtgatattgttgttatcgaagcaatgatcagatcctttgttgatgtacccagtatggtcggtaacgtcgctggatacgctacagcgggttctgatggtgaagataagccaactatagcagatatatacaataacccctacaaagccgtctcaggcggtgtgaaggctggtcaaggtacaagcgttcatagttcatcctctgcgtataacaaccgttgggtgaaagattacgcaactgctcttgttaaagaggtaaacggtcaggtgctggctaagtttcagggtatgcaattgcctggtggtgttgctccggatggaacccgactgattcaggaagctatgcaagaaaaagaaaacctccgtcaagaacttctgttactgtctgatgcacttccagtgttgatgatgtaaggaggaaaaatgcaaaattgggatgaaaacttatttgcacaactggaatctggggaaggtgtagacaataacctaaaaacagaagttactaataagtatgttaactggtacaagtataaccctactcaacagttacatgattcactaacagccgaagcaattcaaatgaaatctccggatatgtattacgtccgtcgagaatttgttaatattgataaaattttgggtgaagaccgtgaatcgaagtttacaaaatcgtggaaaattgcagcatacatcgattcgtatgcaaactacgaagggcagagagacttttacagtaaattcggtatgatgtcaaacgacgaaatgacacttgtgatcaatcctcgtttatttgcacatcaaactgatggcgggatccctgttctgggagatttgatttatttccctatggataacagcctgtttgaaattacatggattgagtttgacccgttcttccagttcggcgatcgtcctcaacgtaaaatcaacctcgttaaatttatctatactggtgaagaattggatcctaaactgcaacgaaatgaagggattaacctttcccccgatgccgatctggatctcgaacctattcgaaatcttgatgggttggcggataccaatattgaacaatacgaagaagatcaagcctttgaagatgaaggcgatgaattcattgaatcgtttgatgttgtcaacgggcgcggatcgccgttcgcacagttcccataaatataaccaggggaaaccctatacatgtaagggtataggagaaatcttatacccgctttaacccatacaggaaaaataaaatgtttggattttggtataatagttcgctgcgaaattatattgtcttgatgggttgtcttttcaatcacgtgcaagttaaacgcattcgcggcgaacaagaaaaatttatcaaggttccgattacctacgcatcaaaagaaaaattcctggcatccatgaacaagctgaactatgcatacagtcaggaaaatgttgctaaaacggaaacaattttaccacgtatgaatctatccctcgttgatttgcaatataacgcaattcgtaaaactgggatcgcggtaaaccaaaaaatgacgcagttacgcgcacctggaaaaacagtaacgcagtttaaccctgctccgtatcgtctcatgttcgaactgggagtgtatacccgttacgaagatgatgtgtttcagatcatagaacagatactgccatacttccagccgcatttcaactgtcgtattacagaattacataaaaacgacattaaaatagaccgagatattaaaatatctctgcaatctgtttcccctgataccacgtttgaaggtgatacaacgacacggcgacacattgaatggtctttaatgtttgaattacagggctacctgtatcctcctgttaacgagattaaaggcgagatcagaacagtatacacggatttcttttccaatatgaacccgttggacaaagacaattttgaatccgttgatgctcaggtggatccggttgatatgcctatacaggattacacgggagaagaatacgttcaaacgtatgctaatgatatcccaattcctagcggtgatcaacctcctaaaccgaggggccaataatggaagaatttagcgtaaaacaactacttgatcttgaaaatctccctggtgctgaaactggggaagaaatggttgtatatgaaaaactcgaactcgttgatgtcgagtcacacccagcagatcgaaaacctgatttagaggaagactatgcacttgcgcgtaaaaccgcgcattacatgaatcagatgatcatggatatggcacaaattgccttgcataacgctaaaaactctgaatctccgagacacgttgaagtttttacaaccctgatgaatcagttaaacaattctaaccagggattgatgaaaattcataaagaaatgcgagaaattaccgaagagacgacaaaaccaggatctgaaaaaggtaatggcggcggtaatgaaatgaacatagagaatgcaactgtatttgttggttcccctacggaattaatgcagaaatatggtagtgcatacgaaccaaaagaaggcttcattaatggtgaagcggtagaggtaaaccctgatggaaatggaaccgacgatcgatccgagtaaggaatcagatcacccaatcggattaatgcatcccgattatctgaaaaagaaaattgatgaatttgggatggagtggacgcaaagcgaacatgataaaaaatggtatccgacaaagtttagtgattacctaaaaattaacggtatccataaagttgatattcaagcaaaagacagttcaaactttgcgacgtataaaaacaaaggaaacaagaaaactcgatataacggaaacccaaacctgaaacgcgcgtacatccaaacgaaatggacgcaacagatgttgatggagtgggttaagtgtcgtgacgatattgtttattttgctgaaacatattgcgcgatcacccacattgactatggtacaattaaggttcagttgcgtgactatcagcgcgaaatgctgatcgaaatgcataaaaaccgtatggttgcctgtaacctgtctcgccagttgggtaaaacaaccgttgttgctatcttccttgcacactttgtgtgtttcaacgaggataaatatgttggcgttttggctcataaagcctctatgtctgcggaagttctggatcgtacaaaacaggcgattgaacttctccccgatttcttgcaacctggtatcgttgaatggaacaaaggttctattgaacttgataacaaatgtaaaattggtgcgtttgcatcttctcccgatgcggtacgtggtaactccttcgcaatgatctacattgacgaatgcgcgtttattccaaactttattgatgcgtggttagcgattcagccagtaatttcttctggtcgtaaatcgaaaatccttatcacaacgacacctaacgggcttaaccacttctatgatatctggaacgctgctatagaaggaaaatccggcttcgtgccatacacggcgatctggacatcggttaaagagcgtttgtatacagacggtgatgatggcgtatttgatgacggctattcatggtcttcgaagatgatcgccagttcaagtaaagaagcatttttacaggaacactgtgctgaattcatgggaaccaacggaaccctgatcgctggctggaaattgtctaaactatcatgggttgatactgatgaaacagaaactaatttctatcagtataaagctccggtagagggacataaatatattgcggtactcgacccagccgaagggcgcggtcaagactatcacgcgatgcatattatagatattacatctatgccgtttgaacaggttgctgtataccattcaaacaaaacatcgcaccttattttgcctgatgtcctgttacgttatcttatgatgtacaacgaagcatgggtttatatcgagctaaatagcacaggtcactcagtggctaaatctttgttttctgagttggattacgataacgttatttgtgatagctatagcgatttggggatgaaacagagtaaacgatcgaaagcgattggctgctcaaccctaaaagacttgatagagaaagataaactcatcataaataacaaaaagacaatacttgaatttcgtactttctcagaaaaaggtgtttcgtgggctgcggaagaaggtttccatgacgatctcgttatggcgctggtttgctttgcatggctaacaacacaaatgaaattcgcagaattttgcgagaaagacgatttgcggttggcaaatgaggtattcgcacgtgagcgcgaactgctttatgaagatatgttatgtcctgttatcgtaacgagtggcgacgaaacaatatctgtcggccaacacggtatttcgtttatataaatttagaggaaacttaataatggctttaatctctccaggcattgaaactaaagaaacatcggtacaatctaccgttgttcgaaattcaactggtcgtgctgctattgttggtaaattttcatgggggccagcttaccagatccgtcagatttctaacgaagtcgaactggtaaattattttggctccccagacaatgacaccgctgattatttcatgaacgctgtaaactttttacagttcggtcaggatctgcgtgttgttcgtgtcgtcgataaagaagccgcaaaaaacgcaaccgcgatctataatcagatcaaaaccacgatcaccgctgctggttctaactatgcagtagacgatcaaatcaaagttaaacacaataacgttgttattgaagaagatggcgttgttaccagtgttgatgatcagggtaaaatcctgtctgtgttcattccgagcactaagatcatcgcacacgctaaacaggttggtgtatatccggatctgtctagtggctggactacagaaatcgtttccagttcttctggtgtttctgctacgattacaatcgacggcgtagaagttgatccgggtattactctgctcaaccttgacaccgcaaaagaaactattcaggcaactgctttccaagaactttgcaccaaataccagctaccgtctgttattgcaatttatcctggcgaaatgggtagcaccgtaacggttgaaattctgtctaaagctgcatacgattcttcggctgtcattaagtcttatccttctggtaagtctggtaaaaacagcggtcgcagttcgatgaactttggccctcagaatgataaccaatacgcgtttatcgttcgccgtggtggtattatccaagaaacgtttatcgtgtcaaccgctaagggtgataaagatatctacggttcaacgatctacatggatgatttctttgcaaacggtggttcgcagtatctgtatggtacgtccctaaactggcctgtcggattctccggcgttctggaactgggcggcggtacttctgcaaacgccactgtaggcgctgatgaactcatggctggttgggatatgttcgcagatcgtgaatctctgcatgttcctctgctgattgcgggtgcttgtgctggcgaaactgccgaaatttcgtctactgtacagaaacacgctgtgtctatcggtgaaacccgttcagattgcgtcgtattcgtttctccgccgcgttctgctctggttaatatcccactggctcaggccgttgataacctcgtagaatggcgtacaggctacaaaatcggtaatactaccccagttgataacaacatgaacgtaagttcaagttatgcgttcatcgacggtaactataagttccagtatgataaatacaacgatgttaaccgttggatcccgctcgcgggtgatatggctggcctctgtgtttataccgatcaggtatcgcaaccgtggatgtctccggctggctacaaccgtggtcaactgcgtaactgcatcaaactggctatcgaaccgactaacgcgcatcgcgattctatgtaccaggtacagattaacgcggttactggtttctctggtggtgctggatacattctgtacggtgataaaaccgcaacgactgttccaagcccgtttgaccgtatcaacgttcgtcgcttgttcaacatgatcaagaaagacattggcgataacgcaaaatataaactgtttgagaataacgatgatttcactcgttcttccttccgtatggatgcaggacagtatatgtctaacgttcgcgctctgggcggtgtatacgattaccgtgtggtttgtgacactacgaacaacacgccggatgttattgaccgcaatgagtttattgcatcaatctacgtcaaaccagcacgttctatcaactacatcacactgaacttcgtagcaacctcaactggtgcggatttcgatgagttgattggatcaacgtcagtataacatgtaaggggctgaaaagcccctataaatacacatagaggttagaaaatgcttactgatattgtacgcgcctttgaatccggtgatttcgcacgtccgaacctgttcgaagtagagatcccgtacctgggcaaaaactttaaattaaaatgtaaagccgctactatgccagcgtctaccgttgaaaaagttccggtaggttacatgaaccgcaaaattaacgttgctggtgaccgtacctatgatgactggacaatcacggtatataacgacgatgcacacacaacccgtgatgcaatcgtagcatggtcaaacatgctgcatggtatgggtgaagacattacaggggatatccctgcaaactacaaaaaaaccgctacggttaaacaaaaaaaccgtaacgacgaagtaaccgccgaacataccatttatggcctgttcccgaccaacgttggtgaggttactttagactgggatagcaacaacgaagtgagcacttttgagtgtactttcgcgctagactggtgggtttaaacgctataaatacaggggtagcaataccccttatcattatttttcggagttgtaaatgaacttttttggattagacaatgtgttagggtttttcaaaaatttcgccaaacaggatgaaatggaatttgaagcccaattaaaagatgatacaggttcgattgcgcctccgaaaaataacgatggggcgcacgaaatcgaaacggacttatcaaaccagcgttattcttctgtgttccaacagttctattccggacaggatccgcgaattcagaacaaaacacagctaataaatacataccgtggcatcatgacatacccggaagtggaaaacgctgtttctgaaatcattaacgaagcgattgttaatgaacaaggaaaagatattgttacgatggatcttactaaaacgaattttagtaaaaatatccaagataagatcatggaagaactcgataccgtaatgaatattcacgatttcgataaccgaggctctcgtttattccgtgattggtatgttgattcgcgtatctatttccataaaatcatgcacaaaaatgaagctgacggcatcaaagaattacgccagttagatccccgttgcatggaactgatccgagaatcggttacagaaaccctacccggtggggttaaaattttccgtggctatcgtgaatacttcgtatataccgcaccgaaaaacggttatagctacaacggacagatttatagtcacaatgacaaggtaaaaattcctcgctctgcgattgtttacgctcatagcggccttgaagattgcgacaacaacattataggctacctgcaccgcgcggtcaagccagctaaccagttgcgtttgctggaagatgctatggtgatttaccgtattacccgtgcgcctgaacgtcgtgtgttctatatcgacgtaggtcagatgggtggccctaaagctacacagtacgtaaataacattgcacagggcttaaaaaaccgtgttgtatatgacgcgagcactggtaaagttaagaatcagcaaaataacctgtcaatgacagaggactattggctgatgcgtcgtgatggtaaagcagttaccgaagtttcaacgcttcctggtggcactgccttctctgatatcgacgatgttaaatggtttaaccgtaagctgtatgaagcgttacgtattccgttaagccgtatgcctcgcgatgatggcggtatccagttgggtaacgatggcggtattacccgcgacgaattgaactttagcaaatttattcgcgaattgcaaattcaattcaaccctgttcttgcggatccgttaaaaactaacttgatcgcgaagaaaatcattacagaagatgaatgggatgaaaacgtaagtaagattgcttttgtatatcagcaagattcttactattccgaaatcaaagatattgagattttggaacgccgtttaaacctgatgggccaacttgaaggggtggtcggcaaatatatctcccataaatacgtaatgaaagaagttctccggatgtctgatgaggaaattcaaagcgaagccaaacagatagaagaagaatcaaaagaagaacgttttaaaaatccagaagcggaagaggaaaacttttgatgaaagaatttatcgaagcaatcaaaagcggtaatctggtggaagctaaaaaaactttttactccatcatggaagaccgcacagaagcgcttcgtcacgaattacgcgttgaacttgccgaagctgtacgcatcgaaggcgaagaagacaaagaaaaagacgacgaaggcgctgataaagatgacgaaaagggcgataaaaagccagccgaggatgataaatccgataaagatgatgagtgaggtgtgtaaatgcaacttgacatcgaaatcaccgccgaagatctccaggaacatttagacgaagcgaaagcccgtgtagatattctgggtatcgatgaaggcacggttaaaatcatcgaaaatttggcggtcaccgaaccaaatttagcccttgctatgatggcggttgttgaaggtttaacacttgatgaggtaattgtcaagcatgttgattcccgtggcaacgtagaacgcctcaaagacaggaaaacccgtgagcgtaatgcgtatcagacgaccggattaactaaatcccaacgtcgccagatcgcgcgtcgtgctctcaaaacaaaacgtgctaacccgtcaattgctactcgcgcacaacgtaagcgcaagaaagcattgcgtaaacgtgctgcactggggctataaatatgaatgaatcccaaatcaacgaaaacggcgatatgcttttaatcgaagaatggggtttaccttgcggtgacgtttcagaatctattttagaatctgttggggaatcaaaagacggtaaattgcggatcgaaggtattttccttcaagccgaaaaggttaaccgtaaccgtcgtttgtatcctaaaaacgtacttgaagaagcagttaacgattatattagaactcaagttaacacccgtcaagcattaggtgaaatgaatcaccctccgcgcccgaatgtggatccgcgaaatgcttgcatcctgattgaaaaattgtggtggaagggtaacgatgtttggggccgcgctgttgttgttgaaggcgacggtggtgatggtgacaaactggcggcgttgattcgtgctggttgggttcctggtgtttcttcccgtggattaggtaagctctccgattccggcaaaggctacggcgttgtacaaaagggctttaaattagctgtaggcgttgatgtcgtctgggggccaagcgcacctgatgcatatgttaagcctatagtggaaaatcagcaaagcaaaccgcttgttgagaataatagtgctgatgacgcttttcgggaattgtccgagcgtttgaaaggtctataaatacattaaacaaaacaacaggaaaatcaaaaatgcttaaagaacaactgctggcggaagcccagaacctggatactccggtcgagttagacagcattttcgaatcagttgaactttctgatgacgtgaaagcgacattcaccactgtattcgaacaagctgtaaaagctggcgctgcaaaactcgctgaatcccacattacccagatcgcggaacgttccgacgaactggtcgaagctcaggtaactgaacgtgccgctgaaatcgaaactaagctgtacgaagatgctgataaatattttgcgcacatttccgaagaatggctgaaagaaaacaaagaagccgtttcccgtgacatcaaagccgatctgtttgaatccctgatcatgggcctcaaagaagttctggttgaacataacgttgtcattccggaagaacaggttgatgtagtcgccgaactggaagacgaactgactgagaatcagcaggaagttaaaaccctgtttgaagcgaatcaggaactgaccaaagaaatttcagaaatgaaacgcaatgcagtagtttcagagaaaactaaaggtttgaccgaatctcaggtcgaaaaagtagaatctctgattgaagggctggaatattccgcaaccttcgaaaataaactcagcgcaattgttgaaatggtagcaaccaaagctgaaaaacccgttgacgagtctgtaaatactccgcaaacgaaagataactttgttccggtagtagaaagtgttccggcagagaaatccaagatcaataaatatgtacaagcggcaaaagccctttcttaatttcaaaaggtaagaaacaatgtctaagaaaaacgaattgatggaaaaatggaacgatcttctggagtctcaggaaggcttaccggatatcgctaccaaatccaaaaaacaactgattgctgccattatggaagcacaggaaaaagacgcagaagttgatccggtttaccgcgacgagaaaatcgttgaatccttcggtggtttcctggcggaagctgaaattgctggtgaccacggttacgacgcaaccaaaatcgcttctggtaactcaagcggtgctatcaccaacatcggccctgctgtaatcggtatggttcgccgtgcgattcctaacctgatcgcgttcgatatctgcggtgttcagcctatgactggccctactggtcaggtgttcgctctccgcgcagtgtacggcaaagatccgctggcttccggtgctaaagaagcattccatccgatgttctctccggatagcatgtactccggtcagggcgcggctccgagcaacggctttaccgaactggcttccggtactgctatcgctgacggcgctatcgtgttccacgatttctctgaaactggtcgtgtgttcctccagaacgtttctggctctccggttactgtaactggttctacctccgatgctctggatgctgctgttatcgccgaacaggaaaaaggtactctggctgaaatttcttacggtatggctaccagtgtagcagaactgcaagaacagttcaacggttctactggcaacccgtggaacgaaatgggcttccgtatcgataagcaggttatcgaagcacgtagccgccaactgaaagcacagtactctgtagaactggctcaggatctccgcgctgttcacggtatggacgctgacgccgaactgtctgctattctggcaaccgaaatcatgctggaaatcaaccgcgaaatcgttgacatgatcaactataccgcacaggttggtaaaactggtttcactcagaccgttggctctaaagctggtgcgtttgacttccaggatccgattgatgttcgtggcgctcgttgggctggtgaaagctacaaagctctgctgattcagatcgacaaagaagcaaacgaaatcgcacgtcaaactggtcgtggtgctggtaacttcatcatcgcttcccgtaacgtggtttccgctctggctcgtatcgatagcggtatcactccggcaggtcaaggtctccagaagactctgaacgttgacaccactaaagcagtattcgctggtgttctgggtggcgtgtataaagtatacatcgaccagtatgcacgtggtgattacttcaccgtgggttacaaaggcgataacgaaatggatgctggtatctactacgctccgtatgttgcgctgaccccgctgcgtggttctgatccgaagaacttccagccagtaatgggcttcaaaactcgttacggtgtaggtatcaacccgtttgcgaactctcgctctcaggctccgtccgaccgtatcacttctggtatgattaccaaagaaatgttcggtaaaaacgcatacttccgcaaggtttatgtgaaaggcttataagttattgaaaaataacgatattaaagggaaccttcgggttccctttttcatttctataaatagtgaaaacaattgaggctatattatgaaacatattatctacaaaataacaaatttggttaataataaaatttatgttggtgctcattcaacagaagacatcaatgattcatacatgggttcaggggtggctataaaggcggctcagaggaagtatggtatcgataaatttataaaagaaatattacatattttcgatacccgtgaagaaatgtatgaaaaagaaagagagattgttaatctagaatttgttaataatccacatacatataatatgggtatcggtggtgatggtggccctatgttgggtatgtttcattcagaagagaagaaacaagaaatttccaagattactaaagagagaatgacagatgaagtaaaatctcgtctctctaaacttaaaaagggtaaaccacagtccgaagaatccaacaggaagcgctcagagacgttaaaagctaaatatatgaatggacgtatagacagagagtataaacctctcacagaagcacacaaggcgaaattaggccgttctgtatcgatagatggagttgtatactcatccggatcggaggcggcaaaatcccttagtatgtcccactctggtttaaaatatcggattaatagcgacaaataccctacctggaaatttgttgcataaataccattatacactttacgcaggaacataaaatgagtgaaaaattttacacaattaacaagctggtgcgtcagtcacagctaccgcctggcctgtctaaaaaggttcttgatgaggcaaccggaacagaaacaattaacgtagctaatacccgtccggatctggtatctcttacccgtgcggtaaacaacctgatctacggtgaacttgtagcaattcaggaaactaatttgcctaccgcaaccctgttcggtgtgcgttatcgtaaccctaaaggcgatatgacgttttccagcgctgctacctattccggtaagtatgcaagccgtgataacattccagttggtgcggttggtactgcctataccaaaggccaagtttttaaacatccgacaagcgatgtcgtatacgaagcaactgatagcgtaactctcgcaggtgctgatattgatgaagcaattatggtcgcagtattcagcaataaattacgcctggcaagcgaagccgcgccaacaagtcagtatgaaaccagcgaagatattagcacaacttcttttgaaatggatcgttggaatatcaacgttcgttcccgtaaattcaaaactgaaatgaccgtggaacttatgcaggatctggaagcaaaccaattcaacgcagaaaatgtgattgaagatgttctgggtactgttgccagcgaagaagtaaacaaagatatcatccagactctgatcaacgtatcacatcgttacaacgttgatggtgtggtaacaaatggcattttcgatgctacaaccgcatacactgcaaaggatgctccggctttaggtcgtttcctgtatcaattagtgtgtgaaatggggcaggaaatgaatagaacgacttcatttgaagctacctatgtcctggcctcttctcgcgttgtaggcgttctggctgcgtctggttggatgcatgaaaccgatgaaacccacccgttagcgacagggcgacttaaaaacggttattatgtctatactgacaccaatacaccgtttgattacatgctgactggttgcaagtacgatctgggtgaaatggatcatgttggctctctgttctatacgccatacacagaagctgatcaggcaggttcgatcaagatttctgttgatcctcaatccttacagcctaaagttgctattctgatgcgctacggtttatcggttaacccatataccactgctgcaaacgaaagacttgtgaaaggtgatgactgggtaaacctctcaggtaaatctaagatgagtcagattgtgggtatcaaacttcctaaactgggttgatagtataacccaacggggataatattcaataggtggagtagggaaacttactccatcttttaataattattataattaatattaaattagatcttgaatttataaatgatttatgataaaatttattaattataattattatagatcaaataatttttgaaatcaagtaaaaataaatttgattttataaattagatcatgtataattattcttttaataatatattatattagatcaatttaaatttgactactaattaatatagtatattatagatcaactgggtaaattggtgagtatgttatgagtttgaaattagaagatctacaaaatgaacttgaaaaggatatgctgatagatcccctcaagttgcaatcagaatcagcggatatccctaagatttgggctaaatggcttcgttaccattcaaacgcgaagaaaaaactgatccaacttcatgctaaaaaagaagctgatgtgaaggatcgtatgttgtactacaccggaagacatgacaaagaaatgtgcgaagtggtgtatactgggactactgaaatcaaaatcgcgatcgctggggatccgaagattgtagaaaccaacaaactgatccagtattatgacatggtggtagatttcaccagtaaagcactggatatcgtcaaaaacaaaggatactctatcaaaaacatgttggagatccgtaaattagaaagtggtgcataatgtctactgaaaatgaaaaatgtgtagtgtgcaagtgtcctgttccttctactggttatgtgactgaatccgggcgcgtgtgtagcactatctgtgctgactacatcgcagaaaaaacaaaaagcggcgagatcaacgaatccgatgatctgaatgaagttcaaatgttgctgtaggagaatcttatgattggatacggtgaaggaattacagatcgtgatgaacgtccggatctgttagaatctgacgaacatcctgatttttaggataggtaaaactatgccataggcatgacaaaccgattatgcgtaatgaatgaggcttgtacggggttctttgcctggatctcatagttccccattacggaggcaaaacgggcgatggaggcaacaaaatcgcgtcctaaatacatgtgtacccgaaaggggcttgataaaagaatgctggatgataggcgtactcttttgcgccgtccgatggagtttaccttcggcggggtgattgataacataccttcgatcaagggcatgagtaaaaaaagccagaatagtacctcactggctataatcaaatgtacgtgttgggctgattgcgtcccaaaattaaaaagccccttcctttcggttggggctttttttagaacttttcttcttctccgctttcgagttcggcctttaattcttcggctcgacctttcagcgcatcgcgcatagaaatatcgtctgacggcgcaacatcaacttcttttacacgatttttgtaatatttttcaagctctttaaggccgtccatagtacggcaagaggcgaccttgctcatgaaatcatcaatagccgcctcataaagtcgaaaatcgttgaaactcttcattttgacctctaaatttcgatttgtttgatcacgtagtcaaacttttcttcattgtaaatgcgtactcgttcgattgcgtgtttcataccatagtttttgtatgaatatttatttttagcatttttggactttgccagcgttgctaagttatcaaccaaatcccaaacagtagcaagagatttagaatcatgtttacgcagtacgcgcccaattgactgtttgactataacagcagatttgcaaggatgtccgaagatgatgtgatgcaggttcttgacagaaatacctgtactcagtacaccaatagaaccgattacgatcagccccttcgttgattccgcgatccgtttcatttcgtttcgctcatcaatccccgtttccccagaaatgtatacaacgttgtcatatacctttttgagttgctcatacagccatttaccatgtttgatctgattgaacatcacaaacacgttttcatctttttcccttgccagtttcaacgccagcttacagatccatgagttacgcctggtatgcgatgttatatacttgatttcgctttggtaatcagcccccttcattttcttaatctcatcctctttatatctcatgaagatggtattaattcgaaggttggtaacttgaccttcctgcatcaaccgatttgtatcaactggcttgaagatttgaccaaaagcgccaatgtattgcatcatgtttgctttgccttctttcagagaaccagaaaggccaaacttgaaaatacactgatccattgtgttgatgatcttctgtatgctttgtccggttgatttgtggcattcatccaccatcaaacacatgaactgctgaaaccactcaggaggcattttaacagccgattgccacgtagacacgtagatcaatgcattactgtttttagcagttcctgaacgtattccaagcattgcctcgcgaggtaaaaggcgatagttgacaatatcaccgatcatctgatcaacaagggcagttgttgggacaatgattagtactttgcctgtgtaattttccagacaccaacgagatatcaatccctgaataagagatttacccgctgacgttgggaggttaagcacagcacggcggtttttaatcgcatgaaacaccgattgtttttgataccaatacggatcaatttgcttgtttccgtcgtatactgggtgttcttctaaccacttgtcaaaatctggctgggtaatttcttctgtttcgtggatcttaggatccatccagatagaatacccgcgagactccgcgaattttgttacaagataggctaaaccgtagggcagtttcccgttatagtccatcaagtatatgtagccgttccatccaccatatttgtattttgcctggtactgataacctggcggctggaagctgaaatagtcgcgcaattcatagactatgttagcctctgcctgaatctgcacatgactagtgttaaggaatttgacttcgatatccactatgtgtatcctatatacggtttatatgaatatttataggctaaataatgataaacattggagaactacaatgagtattgattacgaaaaggttgaaggtttcaaagccttagaacaaaaagaagccaaattacagcttgctacctacgcgcaagaaacgtttgatgtcaaactgaaccgtcagaagtcattcgaaaatatgcttgctgatctggaagctgccgtaccggaagaaaaaccggaactgttgatcgactcccctgatccggaaattgttacatacgaaggtgaaccatctgttcctgatgttgctccggaaattgccgaccagattgaaattgttcccgacgctctacaagctcctataagcgattctgagacggtttctgatgaactggcatggatggaagggtttaccccgtctatcatcatgatgggccgctctgtttcgaatgttggcttttatacgtgtccgtattggatctatgattggatgaaacaaaatccggattggtataagcaccctgatggttgtcctcattattcagcgcgtcaaaccctcaagtcactggcatggtacatgcaccgtgatgggatggttactgtacgcgaaaccagaaatagccagttcgacacgttcaaaaaataattttaaaaagtagttgaccttaccctgctgttcgagtatattgtattcgaaggcgggggaatggctctcgcagtgaagaaggaaatacaaaatgaacatgatgaaaaatgcttactacccagttctgtttgtttggactaatggtgaagttaagaaaatcgtcaattctaaagctccttattacactgtaggtgaagcacttcgccacgctgcggaagcaaattatcctgttcatgccgaacctggttatgctcgttggaacggttctaaatgggttgctgatacctgggacaactacgaagaagaaagaatggagtgtgatcctgattacgtatctcgtcaaatggaagctcatatgattgcagatcgtagactggataatgaagctcgcggattctattgattaacaagtggctacggccccttttcttttaggtgaaatatgaacttaaatcacgaatgtttaaaagatttgagcgatggtaacgagattggtaacgttatttttcttgatatcgatggcgttctaaataatatgcggtgcatgaaatttggtgaacatatggacatcgaatgcgcacgacacttacgccggatagtgaatcacgctaattgtgatatcgtcatttcctctacgtggagaatcggcaacagtacccataatctacgtgaaatattttatccgtggggattgtatcggatcattggtaaaacttgcactaacttccctcatagtactggaatgcgtggtgatgaaatcaaggcatggatcgatactttcggatgtaaaaactatctcattcttgatgatgataccgatatgctttcttcacaaaaagaacattttattaaaactgatgggtttgttgggttgaccgaagaacaatccacttatgcgatccgtaacattttcggggttactactccgttttgtcctgaatgcaatgggtatggacgtgttaacggctacgacaaatgcggaacgtgtaacggtaaaatactccggctataaataccaataaacataagaggctaaatttatggcaattccttctgtaacaattagcgccaacaaaaacgaacttttgattggcgaaactttgaccttagaggttgaaactactgaactagatcctggtgatgtgtttctggcctatcgttggcaaaaagacggtgtagatattccaggcgcaaccgccgatacttacacaactacggttgacggtacaactgctggcgattatactctgatcttaaaacacggtgctgatgaagaatcagcaacagaaaccacgtctgatacaatcaccgtgaccacttattctgatgatcttgtttctaaatggacggttcacccgattccgtggcgtgataccagctttaccccgatcggttattgggtacttgatgaaattctgtatcaaaaagcacagggtaaagattggaaaactgattatgctgattacaagtatagtgaggaagtacaaacgatcctgaaagcgttcatggaaaacggtgaatgtgagatccaagattcacgaaacggctatattcataaaatgagtgaaatctaagaggctttaaatggcaactgaaaaatggactacggttcatcctattccgtggagaaataccagttttacatatcttccatactggctatacgatattatcgttgatgcttttgagaaaggcgacgactggcgcgattatgcggaagaaaaatataaattagagtttgatactctgaaagaggcgtttgaagattatggtgatattcatgtaatcgaatctcgtaatggtaaactggttagtctgttgtcattgactcctgctcctgaaccagatcctgaccaataaaataaggcaaacaatgaatacacttctttttgatttcgacgacactttagcagaattttctcagactttttatgataagttcggtgtacgtccggaaggaacgccaaaggaacgatatgatgaaatggcggcttctttggtgcgtactgatttttataaaaaccttccccgtattcaggctgggattgacctccttcaatggagtttccaacgccgaatcggtgatcctgctactttgctgcttcgcgcggaagcggtcagccctctttgggttatgaaagaaaaactgaactatacagataagatttgcgctgaactggggatccctcgtctcgattttagtcgcattgactatccggaacagttcgcagaacatgcctatcgtggtgttctgatttcccgcaaccagaaacatcttgaaatctggaacaattctcatctagctaataaagttcctggtattttccttgcggaaaccctggaagaaaatattcagctagtcacggaagcgcttgcaaaggctaatcaataacaaaaaagggaaccgcaatggttccctttcttttacaatctttttaattcatcaagcgctgttttcttatcaccaacaaagaggatcgctttacctcctgcttttctgaaaggcaacaccgcttttgcccgatcgtcaaacaggattcctttaccagcgaatgctgctttttcatggctacttttaacgtagtggaattctggaacgtaacccaatactttttgcaatgctttacgtttttgttcggcaacaccgtcagaattgaatttaccaacactggttagtattgctacatcaccaagtgttcttaaatgatggaataattcaaatccttctttgattggttccagattttcgtagaaatcagttttggcaatttttgctttgcactttttcaactcatcttctgtcatcatagagggttcgccatacattggcacaaatgaaccttcccagtcgaacaatacaccatccatatcaaagaaaaacttattcatatcaattcctcagtttgtgtatgcatactataatgtttaatcattaatgtcaaccccaagtgtcagttttcggtgcgtatgctgcaactttagccacaatttccttatccagttcagctacagatttctgaggcttaccacgggctttaactttgatgtagtttgacttaacaacaaacatccctttgttacttgatttcttgatctcgctatcaacaccaactttgttaaagctgatccaaatgtcgccgtccatatactgtttaagagaatcacccatgttcaggatcttcgccatagtaagggccgcgccttcgtgggtatccatgagaatttctttaggaactacacgatcgcgtttctggttctgctgcatagcaatatgcacatcgttcataacccatacgatatgtacgttttcttttttgtatcccagcgtttcgacatcacgcgcgatgcttaccagcttgctcatgccttttaacgttacgtcaaagatgaggttaggtttacgatcttctggtgctgccataataccggaataaacacggttttggtttttgttggaaatgttgaaaacgtcggcgatcacatgatggagggtagatacgttttctgggtttttgaggttcattgttttgacatcatgacccgtttgtttcttgatctctgctgcgagtttatcgctacccattacaagttttttcagggcgtcaacgtccagggtaataccttcgatgcctagcagtttttccagtgtgaaccctttacctgaaccagcaccgccagcaagaataacaacctgaccgaacttaggataagcacggcctccgaaggtgatcagcgcttcggttaaggtgctttctgtgaattgtttaaatgacttcatgtaaaattctccagtttattttctattatttattgacatgctttctgacagtggtgtatggttatggtgttcgacggataggccggaagaactttaaaccataaggtatatgatatgaaaatcaatttacatcgcttcattgtagaattttcccgcaaccgtgacatggactcttacaactattactcccgtgagattgaagatctttttgcggctcacgttggattccttcgccaccatacccctaaaatgcgtcctgaccacgatccgatatatagccctattacatggcaagcccctatcgatggttacgttgaagggatccggatcatgacgtttaacgcgatgtatggaaacgcgttgatccatatcgcacgtgagaaaagggccgaattccctaacggatggcgtattgatgaagtgattcaaaaccttatgcagttacgacgtgaatacaaagcgggtatgtgtctgcgtaatgaacagtatcagatgtataaaacgtatgcatatatctctaagcacctaattaattccatgttttacatcgttggtaatcatggttccgctatagatatcggttcttatgaaatcgtggcttatgctcgcgaacaaggaaaggccgctgcactgaaaatcattgaatctggtgctatcattcttaaccatcgcattgatactattgcttactatggtgatcaggttgaggttgaaggcgtacaccatgaacgattcaacaaagccgtatttactaaaaatggttatgcgtatggtaatgacattataacttctgcggttcctttcgttcgtctaactgttgaaggatttggagaaaggttgccttataaaccgtcagaagctcaaatgtgtgcggctgctgaaagaatagccagaaagcggaaaatgtataccgatgaatacctggcgtatgtcaacaaaacaaaagaagatgtagaccgagaaatttcttgcatggatttatccatttgatataatgtaagcatctttttaagggaggatacatgaaaacgatacattgcagaaatgaaaacgttgtttattatcacggttcgtgtactgctgctggtattgaaagcatgttattgcctccctgtgattctgatactctgtctgaaaagggcagaaagaaaaatttagaccgtgttttctttaccgctgatatcgggttagctcgtatatatgctggaagggccgcacgttctataggtggggatcctgttctgtacagggttgtgtgtccggttgatgttgtatgcatgaacgaagacaaaggcgcgagcgtttaccatgcagcatgggcgttttgtgaggaattatgaatgataaagtgttggcgtatctcgttttcttgctgggatatcgcttagaagtgatgggcgcgtattcatcaatgtatggtgatttaacggctatctggatggtcgggttaggggttgcttttacattcctttcctttgcaattgttaatgaatcggaaaaggatattgtatgaaactatatcatgtgatctactctggtgttttaggcattgacaaacaaatgttagttgatgtaatgtgtaaaaaactcgatgaacgaattggaaccagatacaaaaatcatgtatcggaaagtgttttcatcaacgttgaccatccaaatgacatggaagaaatggtcaatactcttgatgatcagcagatcccgtttgttgacaatttcaacatgagcgctggagtgtatacggtagtaacttttgttctaaaaaatgttgacatccgaaacgatagcgtgttgaatgtagttgcaaaaatcgattctaccaaaggaaaataatatgaaaattgtacaccgtagcatttccgaactgtctcaagccgaaaaagtgcaaattcatttcaaattcaatgatttgcgtaaaggttatgccgaaattgcccgtgaacatgggttagataacggcgatatttaccaggtagtacaggaaattgaacgtatccgcgcgttccgttctgcaaatctccctgttaaaaatgcaatgcgccgcgaagcgatcgaaatccatcgtaagcgtgtgtacaatttagaacgtgctaaacgtccgatgaagaaagaaaagaaacctcgcccgtttaaacgcgaacatcttaacacctctatggcgctggcgtttcaagatgcggggattatctgatgcgtaaatctgcgatggatcgttgggctagtattgctacttcaaacgtaaaaccaaatcaagccgctcctgatgtagaagcggttcgtaaagcaaaagaacctgagattgtggcccttagccccgaactcattgagcatcgccgccgtgcgtctgctattgaactggatctgcgtattgcgcgttcatacaatctcaagcatgaacacgccgcaaagaacaaccattcttttgaccttactctggaagattggaaagtattgatgacaactgaacgttgtcagtattcaggcaagatgtttagcaataaacccggtagcccgtatgcccgtacaatggaacgtattaatccacgtctgggatatacacaagaaaatacaatagcggttatcaatgctgctaatgctgaaaaatcaaatctagatgcattcgttaagggtgatgtcattctggatgaagtaaaagtgaagttgctgcgtaaagcactttatcaagtcgaaaaacgtgtgaaaatgaaaggttaaattatgtttaagaaatattcttctcttactaaccattatgaaggtaagttcatcaatggtgtaattatgaacgggcttactggcggtgtgtgggttgcacgtgaaaagatccacggtgctaactttagttttatcaccgatgacggtattaccgttacccccgcaaagcgtactgatgttgttaagccagccgaagatttttatggctgttcagcagtagttgcaaagtattccccagggatccgtaagatgtgggaaaccctcaaaaagaccggaacttatgatgatttggttattcaagtctacggtgaatttgcggggcgcggtgtacagaaagatgttgattacggcgaaaaagatttctatgtattcgatatccgtgtaaatggtgaattccttccggataacctgtgctcgctgatctctcgatctcatggcctgaaaatggccccgctgttgggatatggtacttttgaagagatcaaagaactgccgatcacgtttgaatctgttgtgaataaagcaaatagcggcattggtagcgataatacagtatatggtgaattcgtatatcctatcatggacgttgaagagggcaacattgcagaaggctttgtaatgaaacctgtttcacctgcttttatgccaaacggtgaacgcgttgcaatcaaatgcaaaacaactaaattcactgagaagaaagcgaagaaagcaacccgctttaatgctccggtttcactgtcagaaaaagacaaaaaccaactcgatgagtttgtttgttaccttacagagaaccgtgtgaaaaacgttctttcgaaactggatctggcttcgatcactgcgaaagatttcggtcgcattatgggcttaacggttcaggatgctatcgaagaaatcagccgtaatcatgggcctttcctcgaacagttcgaagacccagcaatggctaaaaagctgtttgtaaccgaagcccaaaacatgattcgccctgtatggggcaaaatcctgaaccatgaattttaaactatgaacagtcacggaaactatagaagtatttctgatgaaatagccgcaataagagaactccttcaatacgtttcagttgatattacttctggaaatatcgtatggtcttctccgcgtcaaggtaggagggttggtgattccgctggtactatgaaagatggatattgtgttataaagtttcaaaagaaacaatatcgcagacatcggatcatcttttatgttgctaatgggtatcttcccgctcttgttgaccataagaatggtgttgaatttggtgatggtatagataatttgcaagaggcaacgcaacaagagaacataagaaagcagataaagaaacgaagcaatgcttctggaaaaagaggggttatttttgataaaagaagaaataactatcaagcgcgaatagttgttgatggtaagcagatttttctaggttcatatgataaccctgaaaaggcttatgaagtttacaacgaaaaagcaaaagaattgttcggtaatttttatgtcgaatgattttagtacagtaattaaaactgccaagacagtaacattaattggcagtcgtaaacctcctgaacgtatcgcaaacattgctgttaaaatcggacgtgctttgaacgaacgcgggatcagggcttattctggcggcgctcctggtatggatagtcactttctgtttgactatagtccggataacaggtgtataatccttcctgagaacgggtttaacggccttttttcaaacggaaaggatatcatcgactttcaagatttaaacacacagaaagccgctgacgaagccagaaaggtagcaggtaacttcgatacacagaatgaatacgttcaaagaaggtatgcacgaaacacgattcaagttcttcgtgaaaatcttgacaatccaactgattttgttttattttgggcggaagaacgtgaaggatgtgttaaagggggaaccgcgatcgctgtaagattggctaggttgtacaaggttccatgtttcaatctcttcaaagaaagtgtattgaacgatgtgtgtgatacgttagggatcaatatcaaacccccaacgttggattttttatggtaattgaacatgcgcccttacttcgtgaaacatacgaaagatgggctgttaataacgcaataggtgaaaatatgattcatgtacgtagtatcggtactgacggcgaaactccggtagaaggccgatcccccactctcgcagaacgagcaagagaaattatcaacgatcagaatgctaagatgatcgaacatgcgcgggatacaatcacaaaaggtgttctgaaacacgcgactcaacaaaaccttatctatgatatgaagcacgatatcggctcttgtctgggtattgaatgtactcgctatgcattccaacgagtttctgaatggttggaagaagaagggctaaaattcgatacagaagaaaaacgcaacgccgctaagatcacaaattctctggctagtaagtacaatcaaacgtatcgaaaccaggaagaacgcgaagttttcggtttcaacattcctgaaaggaaaacagatcgccgtgtaagtgaattcactttttacattagttggtaaaaaggtgttgacgggggttggttatagtagtattctaactcccgtagacaagacactaactcagaaggataaacatcatggaaatcgtaatgaaagcaacttatgctggatattgcctggaagcaaaaggtgttgctaacaacggtaaaggcttacgggccaatgttgaagcaatgctggatgaattacatgcaatgtacgaatacgacaacgtagcgggtagcgttcttatccaggcgttggaagttgatggtgttgattgtgctggttggtgggatgcttacattgactacaacgataaccgggtttacctgttgagcaacaaagattatttctaaggaaccactatgagcgatgaagctgaggctttagaagattgggctgattttgatgacgaagaagacggtgaatatttctgcgttaatcgtggtgcttataaagaccgtttagaactccgtaaacttttatcgggttcctctcaaatatcaggatccaaacgaaaaagtagtaaacaaaaagttcagtatagtgatggttctgtacgtgatgaaactgttgttgctgaattccgtggtcgggttatcacaaaagaaagacaaattgatgtaaagaacttgtatgaagtggctaaggctgctaaaataggttctgtgattgtttgccctgtgtgcaaagaaaaacacacaaagacaacgtatcacaaagttttctgttcgaatggcagaaaaaccagtaaggattgtaagtctaaatatcacaatacaatccatcccgaacgactggatcgggtattttaaaataaacctaaaacgtggagtacgtttatgaacaacaaaactttcgaagaactgaacagcatcatcacttccgtagattcctataaggtttctcactggtcgcaatatccaactggctccgaagaggcgctgttttatattgaatctcgtggtggtaaatttgatcaagtagttacggctggctgtaaccgccttgcgcaaatcctatcacgtccggtgactatggaaaacgtggattttgctaatcggttgtacaaaatgcactttgggcgcgaaatcttcaactacaaaggttggaaagaaattgcagaactgggttacatccctcttgaattcagagcgattccggaaggaaccccagtagcggttaaaaatccggttgcaactttccatgctgggaaaaatgcgctgtggttagcaggacacgtagaaaccctggcgatcaggggagtatggttcccttcaaccgtagcaactctatcccgcgaatgtaaaaaagtgttgaagaaatatctcaagaaaacctccgatctcgaaggtgaagcatttgatatggtattacgtacccgtttgcatgacttcggcgcacgtggaacctcttctgctgaatctgctggtattggtggcctcgcgcacctgtataacttcctcggtactgataccgtagaagcgctgattatggctatctctctgtttgaagattgtcagaaagcgtttgatgatggtgaaatggcggctggtatttcaattcctgctcgcgaacattccactaccgtttcttacggcaaagaaaacgaagaccttgcgtacaaaaacagtattgagatcttcggagaagggatgtatgcatgtgtgtatgattcctgggattttaaagcggcggttcgccgtatcgcagaatataaagattcgattctttctaagggcggtactctggtagttcgtccggattctggtgatatggtagacaatatcatgtacgctcttgaagaactgggccgtatctttggctatacagtgaactcaaaagggtataaagtactacatccagcagtaaggatcattcaaggtgatgaaattcatggccctgaaacaatcaatcgggtgttgaactggatggagtctaaccgttgggcgtctgaaaacatcgcgtttggtatgggcggcggattgcttcaagaagttacccgcgacactcaaaaatatgcgatgaaaatgtgcgcaatcaaaattaacggtgtgtggactggtgtgtataaatgtccaaaaggcgctgaatggaaaaagagtaaaaaagggttgttgatgactatcactgatggtgttaactttaaaaccattgatactctggaacagaaagtgccggaaggctggaaagatgctatgatcacatactatgtcaacggaaagattactgcccgtgacactttagaggaaattaggaaccgtgccgggatttagtatccgcaaaaacgacaaaggaaccgtgattttctatgacaacattccccttgtagctcgcaaggggctttttgctaaaatcgctgggtattcctttaaactggaagaagtcaacgacgaaacactaaaagagatcgtaagaattgccttacaattaagaggtaagaaagacgaacagaaagctattgacatgatcaataaattgggtgaaactcaatgctttatagtgaatcgtggttacaagtacgataccattgcaaaatttgaaaaagggctttgtgaattatgagttattatggtgtgatcccatacacaggaaacaagcaatcgctattacctgaactattcaagctgttccccgaaagaagttcatacatgcgtttcattgattgtttttgcggtggccttagtgtgtcgctaaacgtccctaaacccgttctaagcaacgattatgataagacgctgattgatatgtatgagcgtcttaaaacgcttcctgacctgtctccggtgcgagaattgattgcatcgaaggggctggggaaagacaataaagaagagtatctgaaattccgtgatgaatacaaccagaacaaagatcctttatggctctatgtcctgatcctgcattcattcagcaacgttaaccggacaaacgacaaaggcgattttaacgctgctgtaggaaaacgaaccctcaactttatgacagaaaaacgtttcgaacatttcaaaaagaatgtgacaggaattgaatttcgttctggttcatactctgatattgaaatcaacgataacgattttgtttattgcgatcctccgtatctgatcactgatgcggtgtataacaaattctggaacgcagatcacgaacgcgagttatatgctttccttgactccctgcatgagcggggtatcaagtttggtttatcaaacgtgacacatcatgcaggaaagcaaaatgatatcctgatcgagtggatgcaaaaatataatgtgcataacctcgataaaaagtatctgttaggccagcatactgattcttacgaacaaaataaaacgcaagaagtctacgtgtgcaactaccagaaacgcgacgtaaatacataccctgaaacactggatgacttaatgtaaggtaacatatgtttaagatttttggttatatcccttctgtttacaattgcgctccatgcctgaattctaaacgtctcctggacgcaaaacgaaaagaatatgagtttgtttctgtagccgatgaaaaagacgcagacggcaaaccgatcctgaatgaaacggtcatttctgaactcgaaagcctgttgggtactcgtagactgaccatgcctcaaattttccacgatggtaagcacatcggcggctttgaccaactgcgtgagtacgttcgcaccctgtaataaataatgacacgaaaagagaggttattatgcaggattacgggcattggaaaacgttaagagaagttgacattaataattacataggatttgtctacgtaattacatttgaaaatggtaaaaaatacgtgggggctaaaaagatatggaaacgtataaaagttcctccatcttcgtttaagcgcggcccccgaaagggttttgaagaatcggactggaaaacgtatacatcatcatcgaaagaagttaatgatatgatttccaatggaatacaacctaaagattatttgattgttggttggtatgattcatggggtaaaactttgttagcagaggctgaaatgcaattctctaacgatgttctccgaaatcctgagtggttgaacaagcaaatcggcggtcattttaatcctaactgttttgatgatttgacttatgaagacatcgaaaggtacatgtctttcgataaaggcaatgaacacacatcatggcccgtaatgtatcgagttggtagtaaaacgaaatatgttaaccctgatgaagtagaatcacatttacagcaaggttggcagttcggaagaagtagattagaaaagttgtctgttgtctgtattgttagcaaatataaactttataatacgaaaactgatgaagttgttgaagttgttaatcaaaatgaatttgcgcgacagcataatatagaatcgggacacttgacaaatttgttgaaaggttctactgatagtgtgggtgattggacattattgccagaagtcagaagaaagaactatgtcatcgaagatgataaaggtaataaattctcgtctgtgtctgaatgtgaaagagctaatggattgaaacgaggtgctgctacttctctatgtaaaaaagggatctataagaaaatggttcctgaatccaggactctttataagaaacggttatcaactattaactatgttgaatcttgtcgtgttgaatctgtttctaagataacagaaaacagttttcgtggtcttgttccagatcttgctgtattgcatgattcgaaagaatctgttattctgtggcttgaacaatacatatcctatctaaaggcaaccaaatgaaagtagaaaaacgcgacggaacaatcgtcgatttcgataaagaaaaaattcgtaatgctgtgtataaagctggcggtacgatgacggatgaagacagtgcgattatgcttgtgttgcgtagtcagatccgcaacggtaaagcaatgaagatttcacaaattcaagaacttgttgaagaatctttaatgaagacaaatccgactgttgcccgtgcatatatcgaatatcgtcatgatcgtgatatcgcccgtgaacaaaacggaaaattattccgtgatatcaagggtttgatgactcttagtaacaaagaattaaccaacgaaaacgcaaacaaagattctcgcgtattcccgactaaacgcgatcttctggctggtatcgtttctaaacatatggcgcgtaaccatattctaccgaaacatattgttgcggcgcatgattccggtgatattcattatcacgatctggattacagcccgttcaccccatacactaactgctgtcttgttgacctgaaaggcatgttagaaaacgggttccgtatgggtaacgctgatatcgaacctcctaaatcaatcggtgttgctactgctcttatggctcagatcaccgcacagattgcttctcaccagtacggcgggacaacctttgcaaatgtcgatttagtattggctccttatgtggagaagacattcgctaaacatgtacgtgatgctcgcaaatatcaagtagcattagtaaaagattatgctatttcaaaaacagaaaaagacgtatttgatgctttccaatcgtatgaatacgaagttaacacgctgcatactgccaacggacaaacacctttcgttactattactttcggtactggtacgggaatgtttgaacgcatgatccagaaagcgattctgaaaaaccgtattcgtggactgggtaaaaagggcattacccctgtattcccgaaactggttatgtttatggaaaaaggaattaaccttgatccagaggatcaaaactatgacatcaaacaacttgccctggaatgttcttcaaagcgtatgtatccggatattattagcgcggctaataaccgtcgtattactggttctagcgttcctgtatctcctatgggttgtcgtagtttccttagcgtgtggaatgatgagcacggtaatgaaattcttgatggacgtaataacctgggcgttgtgacgatcaaccttcctcgtattgcgattgaagccgaagcacaggaagatgaagacgcgcatgatgcattttggcgtatccttgatgaacgtctggaactgtgttttgaagccctgatgactcgtattgatagtctcagaggtgttaaagccagtgtagccccgatcctttatacagaaggtgcgtttggtgtaaggttgaaccccgatgatgaaattctggaactgttcaaaaatggacgcagttctatcagtctgggatacatcggattgcatgaaactctgatgcttttcggatctggacaacacccattcgaccggatcggttctcagaacatgggtagactgattctggaatatctacgcgctgcgaccgaagcatggaaaaagaaaaccggatttgggtttagtctgtactcaacccctgctgaatctctatgtcatcgtttctgcaaactggactatgagaaattcggaagtatcaaagggatcacagataaaggctggtacactaacagttttcatctggacgttgaccgcaaggtaacaccgttcgagaaaatcgactatgaagccgattatcattacattgcaactgctggacatatcagctatgtagaattccctgatatgaaaaacaacctggaagcccttgaaaaagtctgggattatgcaatggataaactggactacttcggaactaaccttccggttgataaatgctttgagtgtggctctgatgatgaatttaaaccaacagaagacggttttcattgtacccattgtgggaaccatgatccggaaaaaatgagcgtcacgcgccgtacatgcggctatttgggtgctcccgctgtccgtgggttcaacgaaggtaagaacaaagaaatgatgcatcgcactaagcatcaaaattaatcaaaaagcccttgacttcggttgagggcttttgttatattgggcctatcgaaaaaggagacagattatgaaactgactaagaaaatgaccgatgtagtagcatgtgcgtttgcattaggctacaaagttgaaaatcatccaactcgcgttgaagtcatcaaccctatcaagggccgtcctggtttggttctgtgtgaagacggtacagcatatcgtaatgatgtctctttagaactggcaactactatccgcaccgcaaaacaaatgaaagatgttctcattagcggcgcaaaatgaggaatttataatgtattggacaaaagataaatttgtttttcgtgatgatacgtgctttgggactgcataccgaaacttggctattcgtggcggttcgttttcggctaatgatttgtctaaggtagtatttcctattaaagttactgagtatgacgtattcggtgttaaagggtttactgattactttggtacaaagtttgaatcagaatcttacatttttactaatagcgatcgtgaattattcaaaaaacacgttgttgttaaagagaaaccgttattaccaaaagaggatgaagcaaaggaaatctatgatctcctgaacatgcttgacaatctcggtacttgtcatctgttcggtaaacgcgcccgtaaagcgaaagatgttctcaacttgttgcgctctcgccggaattacctgatccgggaagctgaacgcaatctgaaaaattcagaaaaacaggctgaaatccataaatccacccttgcgaaactaaaggctttgtgatgtttccgttatacgctaaagtgcgtcgaaatgtcggtaattcatatcaggaatggagtgaatggctacgcgaaacgaagtcattctacatttcaaaagccactgatatgaaaggccgtaacattcgctatcgtaaacccagtggtaaacgagtgaatgggatagattacattgttcttgattcgattcgggatgatatacgataatttaactttgaggcaatattatgattttcaacaaaacaaattcacgtaatttgaactatctacgctgtgaactggaagctaacgaaattgaactgtttttctgtggggctacagatccggaacataaattgcattgggtatcaggtgagattgtaagcctaaccgatcagattgtcgaagaggctacccgtcgcgatgcaatagttaaaattggtgctgttgatgtgaactacgaagggcatccttcatttttcattcaatattatccataaaagtattgacctgtatatctgaatgtagtaacatccttcttgtcaactaaggaggatgttatgaaaatcaaaaacactgctactgaaactctttgcaacgaaattgcagaaatgtactggagtaaaggtcacttagaggctatgaaagagtttcaaaagtggtgtgatacccaaaagttagctaaatgggaatacatcgttattgttgaacggatcaaagaactgatcctcgtgaagaaaggttcattcttgctgtcgcggtgaaataaaaagttataaaggctatacatggagatttgaatgaattatattagaatttataacatggatgtggtcaacggaaaagggatccgtgttgttttgtttgtggctggatgcaatcataagtgtgatgggtgctataatcgcagttcatggaacccttgcaacggaacaccgtacacggaagagacagaaaaccatctgatttctctgttgagtaatccgcatgttgatggacttacattaactggcggcgatccgctttaccgtgacaactatcctactatcctaaaactgcttgagcgcgtttctaaggaacttccaaagaaaaacgtatggttatggacaggatataccctggaggctttacaggccgacccagaacgttctaagctacttccttacattgatgttctgattgatggtaagtatgaaaaagatttaccaactaaaaagccgtttcgcggttcagataatcaacgtatgatcgaattcgctaaaaaatcgatagaaattaaaaatatttcttgacctaatgtgtaactatggtaatcttaccacatcgtaaatgacgattaactttaattgagagataatatcatgatcctgaatttcaaaacccgtaaagaagcgcgtaactactgctggaagtggaacattcccctgaaaaccatccgtaatacagggcgcggttcttgtccgtggacagttcaagcaaatgaactgaaaacgttcgtggttggtaaaacttacaaactggttgaccgtgaagggtttactaccaattcacacggtggatctaacaccgcaaacactatccaggcgacacagatcgaaaaattcctgaataacgaggtaaaaattatctcgaaaaccaattcagatactttcaaaattgagcatactccggaaatgacttttagctctctgcgttcgtgggaagctcgttatttcgtcgaagttggcgcggctccagctaagaaaaagaaagccaacccgaaaaaagccaacgttacggctccggttgcgcctgttgcaccagcaaccgcagatcttgatcaaatgcttgatggtggttcggcaatgtcggttgaactggatcctactaaatttgttgaaggccgttcgtatgttctggttaaaccgcagcaatttaaaaatcgttgtggcgctaaccacgggatcaaatcatataccgatgaacacagtaatggtgtatacaccgtttaccatacgacttcgctcggtcatcatcaattgagcaaaacggtagaaaccattgattcccagaccggaaaagttggttactatctgcttgattctgaacgttcgttcttccgtgaactggcgacaggaattgttgatgaacctgttagcgtttccggtaatagcgctatcgctatcaatgtagacgaagcggctaagaaagaagaaatcgcaaaagcaatgacacagcttgaagaagcggttaaagcccatgatgacgcgcttcaaaatctgcgtactgcttccgacctggttcgcaaagctgctcgaaaagtagcagaagtaagcaagtaaattaaactgggtgctccggcacccttttttatgaggtgacacatggaattattagaaggtaaatcttataccctgaacatcgacgctaaagaatttgcagaaaaaacctggcgaaatgctttagctgaattgatcaaaaacaacggctatattacaatcgatcgtattgcgattggggatactgaggacattgcttatgttctgcaagatgatttcgaatacgagatccctagccatatctggaaatacttcaaaccatatgatttaccggaagaagaaccgaagattgctactaaagaagaaatcgccgcgcctgatttaaatttcgtatcttccgatcctaaaatgtggatgactgtaaaacctgttcaacaagatatcaatgatctgcgatttgattatccttttgtcaagcggatcacttcgatttctgtactaccagcgccgactgattcacaggcacttgaatttgcattacagcatgttttcggtgataataagctgtacgcgattgacaaggaagctgctattgatgaacagaaaaaggaaatcatcaaccttctttctctgcatcaacaacttgaagcggtggaattgattgagcgtatgctttctgatacaaagaaagatatcattagcaaaatcactccggcacgaaggaaagcaattgatgaaaatcgagatttacggtattcccgaatcgcttcataaatgttacggctgtattgaagctcggaaattacttgatgagcatggattagaatacgaattttattctgttctaaagccagcaaataacagtgtggggtttgattacgatcgaccccgcattgaagagttagcgaaacgtgttcgtagtcgaagcatggcatttacttaccctcggatctttgtagatggtaattttattggcggttatatgcaattgaaagagtatttgggtgaagcatgaataaagaatacattcgcaaagtagcaaacgctattcacgcaacaacgattgattttctggaagggtttgatcatattatccaccctgaaacgctggatagttgggaagccaaactgtttaaaagtatcaatgaacagtttccggaaaaggttaagcgctggtttatcagacaggaaatcgtagcaacgatccttaatgaacgtggtgttgaggcgttcggtgtaacccctctatataaacgaaaccagattacagacgaaacaatcaagaaatataaaaagatggttcggaagtaataaataatcagttaaatggccttcgggccattttttgtatataaatattggtattgaatacaatataggaaaaaagataatggtagctaaatcattccgcgcacgaagtggccttgatgctgctggtgaaaaagttatcaacgttgggaaggctgatcgtaatacgctgagtgacggcgttaacgttgactttttcaatgaatttaacggaatccagcagtatgacccgactcgtggttattctcaagacatggcgatcatttatgcgcgtcgtatctggtacgcaaaacagaatattgcttcccctgctggggctttcgacgaatccaaatggatcgcaactcgtaatgacccgaaatgggtttatagtaacgtaaccactccagacggtagcattattgaatctggtagttacattatggctgatggacgctttactgaacttctgtacctgctgccggacaacccgacagagggcgacgtaatcacgtttaaagattgcggtggtttagtaggtgtgaacagtatccttgttaagtctaacacccgtcagatccgtttacgtactgtacaatcagcacagtatcgactgacccacccgtacatgatcgcaacgtttatctataacggtaacgtatggcgtgttgctgaaactctggataaccgcgattctgagatcgtgaacgcaaccggaacaggttcattccagttacaatctggcatgacagttttccgtaacagtgctacaggtaaaatcactctccagttgccgaaatatgcaaatgatggtgatgtgatcacaacctatgacgctgataaaatgaactctatcaacgtagccgttttgcagatttatccaggtagtggacacactatttctgacggcgcaattactggtgttacttctgtaactaaccagaaatccggctttggtatgttcatctttgatgcacagaatagccaatggaaagtatatgatgctgataaccgtgttcgtctgcgtcgtatctatagtgatttaaacgcagttcctaacgattacgtttttgttactgcaaacccttctgggactataccaaacgttacagttacccttccaactgatgttgctgatggtgatcgcgtttacgtatccctttatatgatgggtaaaaaccagaactgcacaatcaaagttaaagatggtacaacggacaagatccgcaccaacaaaaatatgatgcagttcccgcagcgcaaagactatccgcctgatgattggtttagtgtaacttcattagcatttaatgctgctagtgattacctcccgtatatcgagttttcttacatgaaagctacgaaagaatgggttgttgctaattatcgtccgatcgttgaacgtgttgacgcaactaacagatcgcgtactggtgttattgctctggctgcacaggcagaagtaaacaaaaacttggaagacaacccgaacgacgaaactgctattactccaatgacgttagcaaataaaactgctacagaaacccgtcgtggtattgcacggttagcaacaactgctgaggttaacaaactttcaaccgatacctatctggatgatgtgattgttacccctaagaagctgaacgaaagaacagcgactgaaacccgtcgtggattggcagaaatcgcaactcaggcagaaacaaacggaagcaccgatgatattacgattgtaaccccgaaaaagttgcataaccgtattgcatcgccgaccttaactggtatacttgcccttgttgctactggtggtgctcctaacaccaacacggatcgttctcaggctggtactggggtttatgaccattcagattatcagaaagcggtaacgcctaaaactcttcgtgagtataaagcgactcagttacaatctggtgttgtatggctggcttctgaaaccgaagttattaatggtactgttgcaagtgcaaacattccgaccgtagttactccggaaatgctgcacaagaaaacctctactgatggtcgtattggtttgatcgagattgcaactcaggcagaaacaaacgctggtactgattacacgcgagcggtaacgcctaaaacgcttaacgatcgtgctgcaacggaaacgctgacaggtatcattgcaattgcaaccactgccgaagtatcagcaggtactgtaacgaataaagcgatcgtaccgtctaaactgaaaggttatctggacaatacaagtcatattaccgttgctactgctgacgggttaactcaatctggtactatctggactacggttaacatcggtattcaatcagcaactgaaactcaacgtggtactttacgcgttgctacgcagtctgagacgaacgcagggacattagatacagtatttgtcacccctaagaagttacacgctaagaaagcgactgagagcgcagaaggtatcattcaggtggctacggctgctgaaactaccgctggcaccgtcacaaacaaggctgtttctcctaagaacttgaaaaatacaattcaggttgatacttcatggcaagctaccgatctggtacgcggtactgtgaaactgtctaaggggcttggtacttggtctggtaatgatgtggctggttctactcttccggatgatggttatgccgctgtaggtgttgctgtttctccttatgaattgaacctgacgctgaaacattatctgccgatcggggctaaagcggttgatgctgataaactggataacctggattcttcccagttcattcgtcgtgatgttaatcagacggttaacggggcattgactctaacgaaagcaaccactgtacaggctaacattaactcaaccgccgacgcgagtttccgggtaatgaatgttagtggagatctgaacgttggtgatggctcatcgatgggtaaacttcgtttgaatggtggttcatctaacgactggtcaattcaagcaagttcagcctctgggcgtattgcaatgatctcaacgggtaacactagcacagttcatctttctgtgtataatgatactcgcggcgttgtagctaacgttaaattccaggctcctgaaattcaggcgattagcaaagtgactctgggtaatgataccgtgatcactgctgctggttctgttctatctatgggtacgaacaacaagacaactaagatcctgacctctgatgctggcaacatcgtagcggaagaatctgcgaactcttataaagtctttactgagaagaacgcgcaaaccttgcttaaccctacgtatgtacgcaaagcaggtgatacgatgtctggacggttgacagtaaacaacagttcaattatcatcgcaggtcaagcggcttggtcaacgctggatgcagtaacagaagcatctaggggcaactggacggctgagatcacagcatcggcacaatacaacttgcttcctggttatgcggttccggttcttgaaccagatccgattaatccagaaatcatgattgtgacccgttatacctatgttaaagcaccgggtactttaacgcagtttggtaacggaactgcattcacttatcagatttgggcacctcgtccgacctctggtactggtgttaatgcgctggcgcaatccttctggatccgtcaaatgaacccaattacgggtaaatttgatggttggggccgcatgtatactagcaacaacccgcctactgctggtgagattggtgcaacgtctgctgttggtactacggttaaaaacatgactgttaccgattggatcaaagttggtaacgttaagatttacccagatccagttactcagacagttaaatttgagtgggtggcataatgtcaaacttaatggcggggttcggccccgattttgtagaaacgcaaattctatcggaaacaaacagcgtaacttacagaataaccgcaaaggcaacacatcccaatgcggttcctaatcagtatgagtttacactaaatcaaaaggcggtagggacaccgcctagtgttgggatcaacgtatggagaattaacaatgctgtagttgatccaattaaaaccttcacattatcgaatgataattcagcaactgcaaacaaagcgtttgttgaatatatggatgctcaaccttctgggctgtatttgataatgactaacggtgaatacaaaacaagccaaatcgttgatgattggtttgctaaaaacagatccgttatgtggcaaggcgctgatttcgctcagagattcccaaattctgcatatgttgcattgtatggggcttcaaaatctcgtatactgattgaatcgttttacgcgaacgatggagttttaaaagaagattcacgcgcatcaatcgatcttgtctatgataacgttggtgatgttgggcgaactggtgtacctttccgatctgttgaagatacggaagaatacaattcaaccaatggatctgaatataaagtatatcctgttgcaaacccagtgatctctaaactggctgattatggtatggctcctggattagctatgatgattgctggtgatttttacgccagcaaagcattattggatgctggatcaacaacaagggttactgttcgatggtttacgggtactgctcaaacttcatcatcggtgattgaagttcctgcaaataaacctgatgagtggttacgatttgaacagttctatacgatccctagtggttgtgatggatttaacgttgctgtatctcgttatcctaaacccgctacggatagtttatctgcgatccgtaactttgtgatggttcaggtatctgctgccgaagctgatcaaaactttgctgcacagtttggggttaacggtatcagaatgaacaacatgatcgatggcggaacaccgtatatatttgaattgcctaatactaaggtttatccaggtggtgattattctgcttccgaattccgtgaagttgatgcataaacaaaggcccggaacatcgggccttataaatatgtaaaaaggggttattatggcagatttaaaagctggttctacagtcgggggtttacctatttggcactccggcacatttccgctggttccggttggtaatactctaacctatcgcggatataaggtttatactgaaaacgataaaccgcaagcatcaaataacgacttcgtttctaaagcaagcggtggtcaatatttgggtgtagttgcctttaaacaggggctacaaattaacgctactttcacaggcggaagtgaccagaacggtttatattctggtgatggtgatggtgcgacatttgataaggccaacattgatcttgtatcatggtatggtattggtattcgttcatcttccggaacaagtggtcgcgtattagttatcaatgctagaaatggtgatgtaaacacgaagggtaatatcacggttgaaaagcaaatcagtattacaaccgctaaccctactgacgcaagtcatgcaacacgaaaaagttatgttgatggacagataaataatgtcacaacaaatgctaatagcagggtattacgcgctggcgatacaatgacagggctattaactgccccgcaattcgcgagcacaggcgcggcttcccgtcccgaacacgtaccacggctcgaccaggtaattactaaagggactatcatagattttggatcttattaaggtgaaacatggctgatttagcaaaaattcaattcctacgtagcacagttgcggggaaaacacctactacaagtcagcttgcagatggtgaactggcgatcaacatggctgattatgccatttacacgaaaaatggttcttcgatcgttcagttagcgggtaaaggtatcccagaaacaaataccaaaaaattaacagttgatgggcctagtgctcttaatgataccgttaccgtagcggaaggtaaaactattactttcaccaacgagaatttaagtggtaaaataactcgtcatatcgtcggtaaatgtgccagcaatgatggatggtacatcggttccggtggtacaagcaataacggcattcttgaaatcggtactattgacgatggtactaaaacaatccagtttgtacaacgcggtgctggtaacgttgaagctagaaagctggtcttgcttgatggttcaggtaatactactcttccaggtgatttaagattatccactaataaaactgttaaaattaacaatggaagcacgcttgtccttgaaatgggcgtaggctctaacgatgcctatattaaaaaccaaagaggcgtaggtgttcttcaattaactaatgatagtaacctgacgttcagaaattcccaggtttattatgctatgagtggaagaggccctggtaaagatggtactcttctgactaatgtagaaaacaaccgtcaggcatggcaatacacaatttcagctgcaactgctttaactccacggtgggtaaaagtagctacaatgaagcacccaggaatggcttcttcacagctggatttaatgattagcggtggtattgattctggacatggcaaacattacgttgattttatcacgttatcaggacgaaatttaacatcatggagcaccaacaatttagataactgggttgaatggcgtcgagtcggttctccttctaaaacaaacgttccagagtattacgttgttaaaaatgattctgcctccgatgctgatgcttcatttgatttttacgctaaggttcctcgatactccaatgacctttatgtcacagtactaaacacatctgggtataacggacaggattctggaagcgtagtcatctttgaaaccaaccaagatactggtgccaccggaccgtctggaagtattcttgtttcgatgaaacaaatttttgacagttactcaaaaccagatttcggcgatactacaggtactcttccggttaaccgaggtggtacaggtgctactaacgcaggagacgctcgaaataacttaggtcttagaactgcagctgttcgcgatgttggtgaatctaacggaaacttgatggaagttggtgcctttggtattggcggtaacggaaaatcactggtaaatattacttctgacgttgatttaatgactcgccttaaggctcttggtggtacagtgttcagagccaacacagcgagtggttatactggggctccttattactcccatggcaccgggttttatggaagagcttctgacacaatggctgcgcttaatatagattatgcaactggtaatgtcagagtatttgctataaacgatagtggtttagcaagtggaagagtaaattctaatgttctctacggcacagcaaataagccatccaaggctgatgtcggacttggtaatctgacaaacgatacgcaagttaagaaagctggcgacaccatgactggtgatttaactgttcctaatttacatgcttccggcccgggtactgcatcagtatatgttaatgcaggaagcggaaacgctcatgtatggtttagaacaaacgccaatgaacgcggtgtaatttgggcaactccaaatacagcggacttaggtcagattaatattcgtgcaaaaactactggaggcacttctgctggtgattttagcttccgttctgatggccgccttgatgttccggtagcagttaaagttggtggggcagcaatgctaaccaaagacgggaatattacctctggttcgatgtttggtggtaaccttaacaactatttgacttctattaaaaacgatatcgttgctggcgataataagcaagtaagcaagactggtgataccatgaccggtaacttgactattaacgctaacttaaaagttgaaaatcctaatggaacgtttgttgatttaggttcagagaactctgataagtatagcagattaacacttgctcgtaaagttggcgatggcgctgctgtagcaatgcttaaaattactcctgaaggatacgtgcaatttggttatcaagaggcagttgctactccatctcctatcaagtacatccgagttaaacctgatggtcttgatgtagaaggtgatttagtttttaatcagacctatcgcggcactgaagaggcagttgatatttctgataagaccattgaccttaacagtcttatcattaaaagaaccgacccaggtactcgtcagttatataaatgtgtatcttctggcggcggaaataatatatcgaacaaacctacctctgatggcaactttgttctcgaagttctgtctttgcgtaaagtttctgataccgattggtcatgtaagcagacctttactacaaagaacggtggtgttgaaggtgtatatgttcgatatgggcaaaatggttcatggtctgcatggaaagaggttgttgctggtgttcaaccgatcaatttaggcggtactggagcaacttctgtagctgctgctcgtaataatcttggtgttggtgaaggacagagcgttaagttcggcggattagttgttgatggaaacatcaacgttgcttctggtaattttgttattgcaggccaagctcctactgataactcgcatctgaccaacaagaaatatgttgatgataaggttgcttctgctattagtaatgctggcgacacgtatcttccgttagcaggtggtactgtaactgggcggttaacaattacaggcgatcagttaaagactacatcgctctgggttactggagatgctgctgttaacggtgttttaactgttgatggaagggctagatttaatcaagagttcattgtatcaacttcggttaacgtccagaacaatggcaacagtcatgtgttcttccgtaaagcggatggtacagaaaaaggacttctttgggttgatgaccctggtaacgttagtataagagcaggtggtggttctgggccagtatggaatttctggaacagtggttcttgccaattcccaggtgctattagtaactttaatggtgttaatagtactactaattatcctggcggcggtattggcgcgtatttaaataccgctggcctaacaagtagatttagtaatggtgcttacgtttctttatatttccaggaatatgtcggaaattatcaccaagctattcttaacgtcaacggttatggacaagataacagcttttatttccgggctggtggtgatttcatatgtacccgtaatggttcattcgataacgtcgagattcgttctgaccgtagagccaaatcggatatcaaagttattgaaaatgctttggaaaaagtagaaaaactaaccggtaatacttatgagcttcacaacacatccggtggtactactcgttctgcgggtttaatcgcgcaggaagttcaagaagttcttccggaagcagttactcaggatattgaagcagacgggggtttattgcgtctgaattacaactcagtaattgcacttctcgttgaatctgttaaagagctttctgctgaggttaaagagcttaaatctcaactgaaataatgtaaggggcttcggccccttttaggagaaataactatggcagtaacagggccgtgggtcggaagttcggcaaaggctgaaactggcgaagcatggatggtgcaagctggggccaaattaagaatagggacaccgttttggatgtctaatatgattggacaaagcgtattccatttaattttcagaattaactatgcacaaggttcttctggcgatccatctagatatagaggattctttaaaagagggttatcagtaaatataggagactcagcaaaccagccaacattaaatgcatttcctggtggtgaagtagggtctttagtagccattacaaatattaaaggggatccttattgtttgtctattttaaatggggctgatcgacgagttaaagtgtctatatttaatgcagcaggtggagaccagtatgatgtttatttcagcggaactactatgagtgatggttggagaagatataggtgtgaagatgctggaggtctcaatgggtattttggagctagaatggataatcagttcggtgctttattagaatatgtttgatagataaaccaacaaactcacctcatactattaaatatattaaaaggctacctatatggtagcctttttgttgcatcctaaatatacctatagtaacctaagaagagtcttataaaatggctgagagaaatcccgtagataaactagccttatttgatcgggtaatatcgtttgtgatgggtgtgaaaacatggaaacaattgctgataaaaataattctaataatggttatgtttcttatggtagtaacttggtacaaatggactgatatattcccgatgataaaaggtgcccttgtagtcgatacaagggctatcgaaatggaaagaacagaaaagtttaatcaatccgcgttggaacagttgagcatagttcatcttacttccaacgcggatttttcggcggtactggcattcagaccaaagaacataaactattttgttgacattgtagaatatcagggaaaattaccatcccaaatcgatcctaaaaacctcggcggttatccgatcgataaaacatccgaagaatacacgaatcatataaatggcttgtactattcatcaactacagcaagttcctacctaccgacacgtgattttgtgccagtagcttatacttttagttgcccttatttcaatcttgataactactattctggatcggttttgatggaatggtatgcaaagcggcctgatataccagatatgaagataaacatcatatgtggacaggccgcgcgtattttaggtcgagcgaggtgattaacgtaatgctggtgttaaattgtgtgatcttccaatagcccgtttgattgctttaaagaagttcatcaccgggctatttttctcgtaaatatcccaaactttcaatttgtcccacggatccggaacataatcttcattccttgccgaaacccccaacgtaaccctcctgtatccagcgctgtcgtgataatacacgaagaatggcctacctattggcgcaaccttacaacctctcttagcggctctcatagcctcatcgaacgtcatggattcccccaaaaatttctatgcatgaatggtcgaattccgatagtttcactcaaaatgaatatcggatgatctagctcatcatggttctcttcatcaatgacgatatcccaatcagtagccttttgttcttctaccgtggcaatgaatacctggtttacttcacacttgcggtgtgtacgtctgatgattgtatccccctcacgaaacacaatcatatcaggattggtagtgcggtacgcggttttacccgcgcacacttcattaagcatatcttcgtatgtcattataaaacctttacacgttgaacgatggtttgtttaacgtctttgtattctccgtgctctttaacggttgctttgaaagtgatttcatcaccttcgtttgcaatgttattaccgaagtaaacaacaacattaccatcaacattaattttggtcatgaatctttctacagaagtgtagtaagaaacttgagtatatcccagtgaaatcactttctcaacggttccggtcatttccagacgttgtttgatttcaccgatgtggttagctttagaaatgcgttcctggcgctcttgttcccactgttcgcggatttcttcgcgtttggcgatataatccttttccagtgcaacacccatgcagtaagcgcacacagcatcgaatacagggctgtttttgttgtcttctttagactggtcagcccaccaaagaacagtaaacattggcatttctgcaattacttcgcctttacgtttgccaatcggcatgatcccttgttccagtagttccagtttttcagtatcgaagactgacagtttaccgcgacgttcgaacagatcgaaatctgcaaagccctggaatatcattttgaaagtatcagtttcagttaaacgggctgaaacacggtcgaaatactcacgcgctttcgcttccgctttctccggatcggtagataagttgcagatatagttatcagaagtataaccgccgcctctacgctcaacacgcaaggtatacattgcatttttacgaccagaagaaatgaagtaagttgtagtaactacggttgcgttagtcatggtatttctccttaaaaggtatctcgtttcgatatggctaatatagcaaaagcccccgaccgaagtcaagggctttttaatcattcattcgaatctttcattgctttatgaagatgaatatcaaaaattttccagtacgcctttccgcgaggataaatttttgctttgtcaatatcgttgttgcttccccatgtattgtttgggccacgacagcgattttttatataatccgtatgccagaataagcgttgaaccgatgattccgtacctaatggatcttctttactgaacagaatttgtgtactcataagaagaacccagtgcgaacaatcagatcgattttcttttctggttcaaacggtgatttgctatcgatgttacactgatagaacataccaacatacttttcaggaatgttagattcaagcgcccatttcaggttgtcatcggtattcggccccaacataaggttaacaacatcaacagcataatcctgctctttggtgttaccggaaccgtttacataatgcccgtgggcggttttgaggatctcaattacttcgctatcgtcggtttcgactttgtaaagcgttgtattttcaggaatttcttcaagaatgatcaaagcggttttcatcacacttacctttgtgtttctgtttacgttttgcttctttaaatgctcgcttgcgatcgcggtgagtagaagcgcggttaatccatgcatgtttcgctaccaaattattcatataagccccttaaagaaaaatatttaggggctttcgcccctgtatcaatccagcagtttgcggatcttgtctgcgatacgtccggcacgggttgcgcttgcagtatgatcgctttcttttgaagccagttccgccagcttacgctgatgttcttcttctgctgcttggcgatctgctgcaacctgtgcaacctgctcattatcgtgagcaatacgcgcttccagttcagacagggttttgtcgaaagttgctacgatttcatctacagaacgaattttattaaacagtttcataatttatctcaattggttagttttaatcagtatacatcaatacggctggaattcaaaatcataaatgtcattcagtgcgcggttccactcggtgtagttttcaccagcaccataacgcatttgaatagcactttcgaacgttgatccgttgaggttcgggaaaccgaacaggtttttgattttgtcatgtgctacataatacagagaagcactttccagcatcgcaaccatcgcagacggttcgtgttcgcggcgcttgatacgtaacagagtacgactagcaccagttttacggcgttgatttggtgctacgtagaaacggaatactacgcgccctgttttatcatcaactaccaggtaaaacccgttttctttcagatccacgccttcgaatttcttgaaggttccgcgtttcatgtcaccaattttaattgcatatttgtgaatgtcaagtcttgtcagaattcttttcatattttttagataccagtttgcctaattttgtaatttcgcctgtttttacgttaacaaacaaggcgatgctcagaaatgggatgctaatcactacgctgatcaatgtaaacagaaaacgtatcacaaaaagaacagcacgttcaagatatcgttgcatccacgcgattcctaaacaactataccctactataaaggtggttgcaacataaaatgcaccaaatcctttacgaaatacgtaacctttcccggattctatccggtcgtcggcccacatttcacgggcagttttcagaatagattcaccactagcgcgagtttcgttagccgaaggcatgtttttaaatttcatgatagtctcctatgcgcccagaactctccaggcgcggttgtttagttagtaatggctaaaaccatatgtaacatcaatcatgactttataacggcatacacgcatttttgcgttattgtaatccactgggatcgctaccacgtcagcaggatccacctttacctgaatgactctaccaacaccgcccccgtagtgtggaaggtatgatttagccgcaacgtgtaggccagtagaacaggtgcgcgttttatcttcgtctaccatgtttcgaggcatggagacagtcacaccaggactattatcaaatttgccagtagcgagatctttatagttatcgcgcacacgtttccaggcaaggaaacaaccatcatcggtcagttcaatgtcattatgtacaaggaacccataaagctggtatacagcatcgcgtgaagggtttcgcatcaaccgttcaaagaagttcaccagatgttcatacggacgatcgttatacatttcgcgaatgattcgttgagtgatatcagaatcaaacactacatctttatatagaagctgatgaccaatgattttaatgttgcctttgctataggttcggatcgcttcttgagtatccaaacaagttacagcacctttgacatcaccagctttcagcatttcatgcgctttcttaaagttcggatgtgtttcacccgccatgaaaacgcgcccttcgtatacaaccgtaatgaacgattcagatccgatcatacgcggtacagtgtctgatactttaggcttttgttttacatcccttttcttagggaattccgctaacttgcggttgataacgcgcccaatggttcgggcgcttacgttgaactgttgggccagtgctgttttacttgcccccgtcaaccatccattatagatagctttctgttgtacttcgtcaagaattttgaccattatttccaccgtattaatttcttaaactcactgagattcttttcgttgttgtaaatcggacgaattgaataagaatcgctatgttcaacaagtgaagccagtaacgggtttagtgatttaaagatttcccatgcctgatcaacacgttttttcatattgctgcgtttaacgcgcattgatgctacagattcacgcagaatcggacaacgcgccctggaaagatttttaccatctttctcatacccttccagacacactataagttcgagggtatcaacaatcttatacagtttttcattatatcggtttttcacaatccgatcaagcgatacaccaaaacggctatgcaatgcgtttgtttctgttgagtgttccttgccaatccatccaggcaagcaattatctttcaatgccttttcggatttaacatactgcttgcacagcatatcatcaaagcataccagatttgaatccgggatccacttccagaggctgttacggatagcaaacacaacagggatcccagtatggcgcatgatacgcgataaagtagattctttcattgctgaatccatagacaacctggaattttcaccatctaagcggctatattcatcaataccatacaaccgaacacctggggctttatccagtgataaaaactctgattttgtcataaacagagaagtttttgccagattgccgttactatccaactcataacgatatacggtcggggtttttgggcgcggttctgaatttttcggtgcatatagcgcttttgatttttcgcgatctgcatcatagatctctttttcttttgtcatttcactggtacggagatacacaatttccgattcatcaaaatgacctttccgaacgatatcattaacaatctcacgctttgaatcactatcgtaatatgcaacaaagctaacacggcttaggttatgcattttagcatacccgacgatatacggtttaaccgtgttggtatccacttttaacagaatgagtttcttctgtttccacggataataaatgcgtgtgatgtcctggcgtttggttgtttctggcttatacttgctccagcggcctccgctacccgttacctgataccatgcatctttaccgtcgtattcgttcgcccaatacccagcaatataatcatcattatatttgttgggtttgactagttcgctatggatccagccaatagaatcaccgttgatgcgaaaattagcatctttaccaacaaagttttgtaccattgaaggcagagaatggaaccacgtcagtttatcacgaacggtttgtaacttatcgaattctgatttaactcgattgaaatacacccggctgatttgtttcagacgttctttaacaatccctactgtcattttatccatactcaactcttcgcgagaaggcatgaaatcaagttcaccgattgggaagtcaataatatacgtatactggctttctgtatagcaatagaacatcgaggtatcatacaaatctttatccagaggataaatgatgttacccatgcgagcatatacaccgctagtgtatgctgatttatgacggatcaccccgctatcgttggttgcttctttcggctgatagttgattttgagaatagaagcaccaacaaagttaggacgaatatcagtaaatgattcgtatacccttgctgcttcgttttcccattctttgatatcttcaactttaaccggaacagtgatagtaaccccgttaggttcatcactttcaatctcatacagaggatcgcagaacggttccccatcatccatatagattgtgtaaccgcatttgataccgtcttttacagattcaactgtgaacgcatcggcatagcaaagcggagatttgcaacccagacccatagaaccgatcaggtcgtttgaatcatttttagttgattcgaagtaaacggtaaacgcatcactaacgaaatcaggagacataccgatcccgtagtcacgaataacaaaacgaggatcaacagcagttggcaactggacatcaaacgggttctgatttcccgcttctttgtgtccatcgatcgcattacaagacagttcgcgaatgattgcgcgaatcttgtatttgtatactgtcgaagaaaggatcttatacgctttcttgtttgcgcgtagagatagtttgtttcgtcccttgctggtatctgtaccaactcggtagattgtttgcggtgtatcttcgcgtaatttcattgtttatttctcacttaacattaaaaataacttggtcacaagagtacttcgttggctttttgttcaggccatattctactacttcgcaatatgtgtcaaggaattttactaatttttcttcctcgacctgctgtttcttcatatcaagtataccccacacgatagccccgataatgatagaaaagaacgcacaaaatccgaatatggtcagatattttcccaacttaggcgcattacaacgtgtcataccttacccctctttgcgaatgtatgcaagttcttcatgggttactggacggatatacagacggccttttgtatatgccttgcgcccactgatccaaatgtttttcatatccttaacaccgttcatcacatcgttgtaaaacttcttatcagctttagcctgatagacttcacggccttgataatctttcatgaacaaacagtaaaggatctcattcttatcaaccagattagcatcctttgtagttgttttactcggtgaaggtttagcacccaggcgcaaggccatagcttgccacactttaccatgtccataaccgcgcccgacaagagcatgagcgatttcgtgtaaaagagtgtctaaaatatcctcgtagatatcttccgcaacatgacgaccagatagttcgatcagttttttggtataactgcaacggcccagagtttttgtaatgcgtccattgatccggaatgtccaaccattactgatcaaaccgtgtttttccatcatggtacgcgcccagtgggttacttccattgcactacgagttttcaacattttagaatctcctttgcttggtacaaaaccaatatagcaaaaagccccctgcattgcaagaggctttgtaattatttcaacttcttagaaagttcttttaaatcattgagatactcaattttaggggttgtttcttcccagtatttcaattgtttgcgcaattcttcggcttcgtcttccagcttttttctttcgtccgtggttagatggtagatgttcatagccactaacatttcggcatgattctcgcaacctatccacgtagacacgaatttaaccgcttcgctgcgactaaggccacgcagagaatcaggagattctaccatttgagcaataaacgcaacctttgccagtgctttatctaacgcttccttagtttcctggatacgcttattgatacgctgttgatatacattcatacgaatatcaacgaaatcctttagaagcgtttcagggcgttcatatgagtatagtttgccctcaaagataacgttaatgtttgggtttgaattttcaatcaacccgaaatctttcaggatcttttcgcgggttaacccattggcatactctcgcttgagcgttacttcataacgaaaatcttctttcgatagatccttgtagctaacgataacgcctttttcttccagcttgtcaaggattgcaatgtatttcacacggtcatacttcactgggatctcggtgatcaccaatttggttttaccttgcaattcatacgtgccgtaaattgtcccgtctgtgatttcacctttaaagtaagggtatttcagatccagtgtgaaatctttatcattcagatatgcaatgcacccgttaacaaccgatttaggatcatgaggcggaatgtttgttgcatatgcttttgcaatcccgctaaacccgttaaccagtaccatcgggatgatcgggagatagtaagctggcggcacatgttccggatcttcatgaactggcgttaaatcaccatccatataaattgctttgaatattggcgatagtttgcacttgatgtaacgaggtgcgccaggtttcttaaccaaacgggaaccaaagaacccatcacggtcgaataacggaatgttattgcaccagtgcgccgccataagggataacgcttcttctacagaggtttccccgtggtgatacccatacatagcaacaccgccagcgatagaagctactttctgaaatcccgttccgccctgcatagcagagtgaataaagaaacggtgaacgggtttaaacccgtctaccaggtgcgggatcgcacgtgaataaatcgtgtaaagggcaaacgttagcccttccacctgtacaacatctttaatacttctttccattagtcaaccttagaaaatttgtgttttccattaacccaatctttacgcggatcagattcgtcgccgaagcatagttctaacacttctttgtattcgtcgtcaagtacaatgacatcatacttcaactgatcacccagaacacggtcgtaatcttctttgcgtaaagaacccagccccttgatatatcgtacatcttttgctttatcgcggaacggtgcaaactcatcaagagaatagaaccatttttcctcgcgcccaactttagcgataacgatcggggttcgaatatatcggatccgtttctcagtgaacaaagaaggccaacggctaaagaatgcaagcaacagagttaaaatgtcgccgccgtcaacgtcagcatcgaccatgataccgatattatcataagtcattccggaagtatcaccaggatgaatattgaggatagccattagttcaaacagttctttgtttttgataatgtctgtaaaactcataccccatgtattcagaggcttaccacgtagcgggaaagcgccttgtgtttcttcattacggcattcgatgaactgaccaacagcggaatcgccttctgtcagaaacaatgttgtttctaccccaggggtatcaataccggaagccggaacgtgtttagcaatttttgcctttttcgctttctttttcgctttggtgatcgcggcggcttctgctgcttgtttacgaatcaatgcggattcaatgatcggagtaatgatttctggggtatccataatcatttttgcgatctttttgtagttcaaattcgcatgattgttaaactcacctgctgtatttgctaatcgctcttttgtttggctatcgaatgcaggtgcattaaagttatgcaggaataccacaagagttaagcattcttttacacgtgctttcgggatctcgatactatgctttttcttgatcatcggttcaagttcagaatagataccatcaatcatacactcaacatgaacaccgccgtttttcgtatccagaccgttaacaaaggatttctgtttaaacccgtcctcagtgctcgccagaatgaagctgaggcgattatttgtctggacaatggttttatccccatacatggaagcgtacagcgggaagcgattagagagcgtttcgccgttatatgtgaatttcacagacgggaaagcaacggcaagggccattaagcgatccttaatcacttctttggtttcttcatcgataccagttacaccaaacatagagaagtctggagtaaacttaacagtagtaccctgttctttactggggctggttcggtaatcgatgttctgtgcgccgtccgtacagttaatggttactttgcgtttcccgtttgcagtctcgccaataaaaatcgagctataacagtttgtcaggaaagaaccaacaccattcatacccaacgttacgcggtttttatcatcgaagttagaacccgattttgccatagtccatgccgcaactggtttaggaactattttcccatctggggtttttacatcatcctggggaataccgcgcccgttatcagagattttaaccagattatgatcaatggttacatcaatcttattagcatgtttgaattcagttcggatcgcttcatcaatcgagttatcaaggatttcgttgatgattttaaccaacccttccacgtactcaaccttgcgatattggcccattatgaaacgttcatgcgcttctttgttaaccgatccgacgtacatatttggacgcaaccgaatatgatcgcgatcgctcatacaaaatgattcgtcaacctttgcgccttttttggctggttgtggtttctgttctggttcatcatctgccagaagaaaatctaaactcatattcacctctttgtttaatcactgacattatatagggttctatgaaaaagaaaacccctttcggggtttacttgttataagggaaaccatcacgaaccatttgaggtttatcaaccgttcgttttgcttcgcctccgcaatcacactctttcggttcgtcgcggcttgcgatgcttgacatcttcgggaattctttttcacacttggtgcatttataggtataggtaggcattaataaatctcttttaaactcaacatcttaactaaacgggctttgtctatgtcaaaaacacattgacgtgcgcccggatacaacttttcaacttcgtataccatgcagacgaaaccaacattgtgcatgtactcgcgttcatatgcattgaaccaacgagaaaggcgctgtattgactgaaacccaaaatataacccagccgcttgaaagtctatgttatctttttcaaggttgcgcatcaatcgattatcgtcatccggcgctggatgtcggtgatcatccatatcaatatagatatcaggattcatacagaattgatcaagccattcagcggtatccatcgacaaataacgattgacatatgggccactttttgtttgccatttttctgtacaatcattccagaaagaacaagaaaattccacacgatatacgaacatgatataatcctcacaagtaaactcaaggtttacaagtacgataccacttatctaatttttctgcaagagtatcgttgataatttttgcaatttcgtaccgtccgtgagtagtacccagttccaggtaaatcacatcaagtgcgcacacaatcgcatcaatactttcttcaacgatattaccgccgcgttgaggctgaatgagacattcgctgatctcgccaacttccgctgataggtgatgaaccacatcactcttcgtgcgtttcttcactttatgtgcaatttcgaaaaacttatcaagtacgatcgtcgtttcttctcgcgttgcggtattctcggatgttgaagccgtgtgttgaacaacatatttcgtaaaatagccttcaaacacgttgaaagggatcatatgaggaacaccattcaaaaacaccccttctttacaaacataatggatttggcgcggaatatacaaaccgccgctgcgttccaaatgccgtttaacgcttgctacaaaatcgaaatctttcccgtatccagcaaacatactgtgataagtgagttgaccaatttcaggaacatagagatcattttctttatacagattcatttacaatacctttatggtagccaaaaatataacaatcaatcgaaggacgttcaccagggaagtgaatgcattgcatgatgcgttcagccattagatcttctcccatgtataccgaagtagtttcttcgttgtaatgggtatcatacgacgttttaagcgtcatgcccggaagccctgcaatgtgcatgaatttagaattggtgcaaggttttcctacttcaccgttaaccatcaacactgcattagttttacgtgcttttctcatttgaatttcaccccgatttgagatacgttccattcttttacgtcatcaacaatatcataatggttgatgtatggtaaagcaatttttaaattactcgcgtcttgaatgttgcgtaagaaacgagtaggagaaagaagacacaacctctcggatccgttgtttcctttagcggcaaatgatagggtttctcccccgtcaattttcatatcaacagaaatcgttttgaattctggtgcgtatgacgtgattttgccgttgtctctcggtgtactatagaaacatacactttgtgggacattataacggtctgtttcaatgtacatgtaatcgccgtcagccattccccacacggtgtagagggatccggtatagtcaccaaaggaatttttaaaatcttccttcgtggtatatcccagcgagcgcaattgcataagctgattatgctgttcgattgcgtcggctttttgttgttcctgtacttgcgcatcaatcgtttcttgccaggaattatacgcatagtaacccacaacagcgattacagccataacccctacagctttccagattttagcgtcttcgtttttgttactcatgctatattccttttaagaaaaagggccgaagcccctttgttaacgaagataaaccacataaccgctttggtcaatcgcgcggtctgcgtcattgaagatattaccacgaatgccttttgctggtgctttccagcttgcaggtttcaggatattaccatcattatcgatgaaggcggcaacagaacgctgattgaacatttcaccagtttctttgttgcgagtatcctgaacaacgcgatgatatttgcggcctttctccagaacgaaaacagtttcgaaaggagaatcttggaaacgagcgttacgcgctttgtacattgcttccatgaaaggggctgctttttctgcgaggatttcgaaagtgttcatggtatatctcctaaagtgtgtttcgtttcgatgtaagtactatatcaaagatggttattctatgcaaggcttttttcgttatccatcaaatattttaagtgttcttttaatgcagggagttcgttcaaatggcgttgcttaactttctcgtactctttgcgttcccagttttcaagattgcttgccaacgcttcatcacaataagcgatcccgcgttctgcatcctgaactttctgtttccattgtgcaactgcttgttgataaagagaaccgttaaccatcataataatttcctcccttgtttcgatggggtaactataccaaagctaccccagaatgttttaacaaaaagtgttattagtaggtatccagtttatacattttgcaccagttcatgaattcttcgaaagtctgagtattaacacgtttttccttcttcactttcttagtgattacaggacggttagtaaaacgtttttgcattttcacagtgattgctactttatcgcccaggtcttctaccttttcaaccagcgcccactgagaaccaatttcagcaccgaaagtcaaaccaacaatctcacctgctttaacgtgtgctgcatattttactttaaccattttcgtattcctttctctgtttcgtttcgatgaatacaagataccaaaaagcctcccgcaatgcaagaggcttctttaacaaaaagtgctattttatttctttgagcaatttacggatcccaccgccctgtgtcttatcaaagattttctttgcatcaataacagaagtgattatgtggtagttgttcccttttccgtcaaactcaaactcgaccttgtagtcactacgaaatttcacaaaaacaaattcacctgcaaagtgcttacgaaactgtttttcgttaatgtccaaccattcctgtgtatcatctaactgatacatgcgacaaaacaggatcgaacccattacaacaatcacgacaaggatagctaacgcaaattctgacatcatttacccctgtttactgattgacgatgcaatgatttagacacaaccggatttcggtatggtttgactttatggatcgtgggttcttccccaaccaaattaggaaattggttgttccattccatcgaaaatggatagggtggtgactttaactcttcgatcatacagtttactaaacggtcgccaattacacccaacgccgccccaataatcgctatacgcataaatcaccccttaattgtgtcaagtacagtaaaccagtcatgaagccatatcgttgttcttaccgcgatatacgttaacaaactaatcaatgataccgctccgcaaatagccagcgtaatcaacagccggatttcaaatttagtaaaattcatatcaatctcctttcttagaacccaatataacaaaagccctcaaccgaagtcaagggctttgttttaaatttttaccagttttggcaatcgaagaactataccaggatggatcagacgtgcatccggaatagaatcacggttgattttagcgatatcaggccaaagttcaccaacaccatacagtttctttgctatagaatataggctatcgcctggttgcacgacatagcgatcagattcaatcttaaccagatcctggttaatgatatcatcaaaggcttttgctttcgcttcgttaatcgtattcccgtagtaatggcgatccataatagttaatgtgatcatcgtttctttcctatgctgttttcgtctgtctcttctaaggatggaggttcttccagccccagagcataacgtttagcatagattagcatcaatgcatctttagcgcaatcatgaatcgaatcatgctgaatgaatccatctaacatgcctttacgtagtggacacgtggtcactccgcgagtcagtaaacggttttcaatagctgtacgcacatcacggctattccagaacacggtcggcatatcttcaaacgtatcaagtttccctgtcatagttcgtacaacatcggttagcatagaacgatcgaattcagggccgcgcgtataatcgtatgactgccaacgactcacaccgtcagccgctaaatcagcaaagaattgtcgatgaccttcgtacaaatccatgtcaatatcggaagggaacaaaaccctttgcgcttctttagattgctgtttccaccattcgatcgttttttcatctttgatgcgttctggttgtttccggatgtcaaatttgtactttcttcctttagcaatcagttcctgaaaggtaggcggatcataaggatcatcaacaaacggaacatagctaagttcagctagttttccttttggaaacgggccaatactttcataatcaaatacgaaatctacgggtaaatgactcattcgcgaccccgcttatacgattccatgaaataggccaatgatagcgcgacttccggagtaacatcaacggattcgatcatgcctggagttaccgccatcatcccgaactgacgaagcccacaacgagcaatcgatttttccagtcggatcatgttttctacagcctctgcaaaattgtccagatgttcccaatcatggtaatcttccattgtcgaacgatcacttttcaaaatcagatcggcaaccaattcagcataaaggcgaggaaggtgaatattcatttaaaacccctcaagcatgtttttgttttcacgaatgttacgacccattttcaaggtatcaatgatcactgcatactcttcaaaagtgaattcgatatcttgtgaaatgtttccccacgtgtaggtcggcccgttaggacagtataacccaacttctttgtttgcgttgtcaacgcagcgcaattttgcaaacaacaaattgatatcgatagaattgaacccttcgagataatcaagcccctctctaccaatacggtcaacttctcgcaaaatcttttctacatctttgactttaacaataattttcataataacctcaaagggccgaagcccttagacataatcaacagtgaatcgtgcgcgggtagttcctacataaagcaactgcttacacaattcataatcggcgtatgcgtatgcatcgcgcgtatacatgtatgaatgatcatacgtgcttccctgacctttgtgatacgtacaaaccggaagcgccttaaccgtctggaacttgtttttgatttgccagaacgaataccagggggctttgtatccggtttcctgtttcatctttttatactgaaacgcgacgtagttcaaataatcgcctaaacgttcctgcataaccggatccgcgataacctgaatatccgctttcgtatcctcgaacatcgattctgttttcatcaagaaataatcgatttgtaccggatcgcatcggtcagctttgatagtatcagaacgcggtatgatttcaaggattttaatttgctcgttgttgttatagataacttcaacaaacgaaaccccattcacacggccttctgtcactaacggttcttgcatcacaaccacttcaccaacaatgaacggctgatcagttttgtacaagtgtttacggatcactgtgtttaacttgtctacgttcgcgttagtgtaagcaaacatacggttattgttcaggtcatccggagtcttaacacggctaaaataacgtctcaggaagtcgccagcgttttcgtgcttcattacccccagttcaccattcatgaggggcattaacggcttaccgtcgcgtatagcgcgtgatacctggatgattgggtttccttctgcctgacgcataatcttatccatgcgaatgacatcaaaaatttcctcatcaaagaacggtgaaagctcggtgatcccttcggtattaacaggacggatctgatccttatcacccaatcccaggatcaccgcacaactcggaatagtacgcttgatgatacggaatagttctttgtcaaccatcgatacttcttcaaccacaaacacacgacattcagacagatcagcggcttttttgcctttttgctgttcaaatactcgtaactcttcgttggttacggggctgattttcagtgctgagtgaatggtcgttgcatccatacctaccgcctcagagagaacgtttttagcctggtgtgtcggcgctgtcaaccagatcccactaatacccagttttttcaatgtttcaaacacaaattttaccagagtagttttaccaacacccggcccacctgtgatagtagtatggattttgtttctgatatttttaatcactcgatcatgtgcatttttctggtcttcgctcagatcgtcaaaagttaattcgctcatactttaatcaataccccttgaatacttgcgtgttcaataaaccaacgcatatctttctttttcttttcggttacggtttcaacttcttcctttcgaaagaatcggctaagaccactttgtttaactggattcatcttatcatgatattctttgataatcgaatttttatactcgttagcatcgtccggagatagaaacaacaaaggtgttaactctccttccttaatgaagggaattttaaacccgtctttatccttactaacgacgatataatattttgtaatcattctcgcccctcataacaaacgtagaatattccaacaaaccaaaacactgatagtataatcagtaaaagttttctttcaacgccatttacgtgaaacacacaccaaccgaaaagatatgtgatcatcgcgcaaacaccataagaaagaaccccaacagctactagcgcgatgatcggatccattagtagttgttagcccaacggcggaggttttcggcttgtttcagtgcatacagtttgtagatggtttccgcatccatacctaatgcaataaacttacatagtacaaagtggaattggtcgatcatttcaaacagaacttctaaacgatcctcttcactcagatccgcaaatttagtattgcgcaattcctggtgatttgctttccacggtttccaaacaccggacgcaggtttaacaccgcgagacattccacccagagcggtatacaattcgcgggtttcgtcggcgatcgcgtcatcttgcagtttcagccaatcaaggatttctccgcaagtttccagattatctggacgcggaacccaatgcagcgtatcagacaggctttgttgtgcatggttttgtaaatccagcatggattgtaaaggatcgccattacgggccagaaccttttgatattcggaatctacaaattccagatcttccgggttaaccaggtgcgcacatgaattaaatacaggagttttatcagtagtcatatcaatctcattttttcggtgatttgtcccacgacttaaatcgaagttttgccgtgagtccagaaacagtattgtctttcaaatactgcataatttcaagtttagttgcgccgtccgtttttatcatttcgttgatatctttggaaggccacgggcatttatcccacattacaaccttttctccagcctcaatcaatttaaagaggcggtgagtagtatccggatgacgtgcttcattgtcaagaacccagacacgcatatttttgtacggaacctcagaaagtgcaagctgtccaccagtgatagcgccagcattatcaacaaataggctatctaatggcccctcaagaagataaaccgtttttagcggatctatcgtatcctgtccgtaaatcttggttgattcctcacaggctttgattgtgatatatttcgactttgcaccgtcacgtaaagcacggccctggaaagattctattttacctttcttatcgaagatagggatcactaatctcggttctggttttgcgatcggataggtatccggattcaccgtattaaccagttgttgccattcgcgagtaaaccacaaccgttcccacttgtcacggggaatacaacgattctgcacatattttatgatcggatgttcatccggcaaggtatctaacctttcgcagaattgaagagtaggaataaatttcttctcttcctttggtggttctgtatgtgttggctttaacgaattgcgatccttaaacgattccatgagataatcacggtaatcgtctggataatattctttcaggaatacgctaaacggtacaccataaccacagttaaaacaaccacaattcatatgatcaccctttttagaagggtagatccaaaatcgttttttgtacttgtctttcattgagtcgccgcaaataggacaacgcgcattgatgcttaatgcccccgatttacgaacgatttcgctttgaggcaatgatcccattattcgggttgcaaattctatatcaagatacatttattacctcagttgactatctttagatcctcgtcgattataccccgcgctgatcatttcgtcatgttctttttggcattcaatacaataacggcaacccttcacgataaccctacgtttttcgggtatcggatccccacaatcaaaacaatgcgttaatgattctccgtttctgatttgagaacgtgcaaaatctatcgcattgtctattgttgcctgaatggtatcttgaacaccgtcagcagggccaaatccaaccgccattgtaaatcctcctaatcaaatgatttcaatatcatagactaagaggatttttctgtcaagaacttacttgcttttctgttccgtcaagcattaacttccaaccacgaaatgcttgtttaaacgaataatttattgcaatatcaattttatcagaaccttttcgacgattctgataaacggtcgcgttgtcactcatatacatgatacaaattggaaaccatgtataatcgttagcagtagcccagatagtgatattcagcggaggaattatcatttctttttccttttccctgcacgggtaacgcctaatactttcggcccgatgttggttactgatccagtagttacaccagaagcaatcttttctggatcgccgccagaatcacccgcgaccatatcctctaacatgcgccccttatcataatattctttgaggcgtggaacgttcaacatgatttcttcatgctcttgttctgtcagattgtagcgattgcgtagggtatcatatgaactggttaagttcataaacccactcatatacggaacagcattcattctacgcttgatatggcgtactgaacgatgaaaaggagaatacgcttctaactcttcttttgttttggggttgcgaattacttcgccttgtccatcaaggatccccagcttgtaagcagtccattcagtccagggctttttgagtagccggatcatccggacgctatatgttaaatccatatttttaactaattgatcactcatgattattactctattgtgaaagtgaataaatcagatttggtttcaggttcaaactccatacaaacaacctcgcatagtggtttaacccctttccaatcctccaggtaatacccagtatctataccgcatccaggattcataacaaggccagtttcatcaagaaactttttgcatttacttgatgtggtgctgtcatcttgtcggaaacagtgtgttttcgaataccggaaatttgcagacatttgagggattatgaaagttccctgacgcgcgatctgtgatgcacgttcgattactttatactcaaattctgcccctgtatacttacccttaaaatcagatgttttgattttaccaaaaggcggattactgatcgccatatcaaacacctgattaaattcagttgttaaggcgtctccatgcacccaggaggcttctggtacgatacgcttacctaactcatagtatgtgtgatttaactcaacacagacgatttcacgcggtgtattgtacatcatgtaatgaaccatagcgaaagataacccaccgataccagcacacaggtcaataacacttccacctgtgcaagcatcgattgtgaaatcgcgagcaagtccaataggggtaaagaacgcccctaattcagaattgtttgtaaacgcgccttcatgaaagttttcaatgatgaacaacttctcttcgtaagttagcgctttgtcagagtgaaccagatccattatctgattgtgtttcttggtttccgctttcgttaactttgccattgtcccagctatacagtaatgttgattcatttgggtagaattcccacccgtccacatatccggtttcccagtcagtagtttgttcaaaaccacagatccattcatatacaccaggaggcatttcgacagaatcaggaagcccgatatcttccgcactgcgtccacattcaaagaatgcatcatgaatgaatggtcgagataataccgtaacataaccttcatcgtcaacagctacgatccagcgcgaactgtgaggactatcgaacttcggttcttcttcgtccatatccgcttttatttcagccttacaaaaatcaatattcatttcaaaccctctttaacaccctctttcatagctttccaggtagaacccgcttcaccattcagggcggcgaatacaaatagtaagatagcaaggacaagattcacgccagcaatcaccatgattttgctatacacgaaaatgtaaggcattgccaccacccaccaactaaaagaattaccagttacgatgttgagtgctgcaagtaagaaagtgataacgaatgcgattttcataatgtcctcctttgttatgattaaggtatcatcttttgcgaaagaatgcaatacctacagatacaaaaaagcccctttcggggcttaatttttatgcgttattgatgagataccgaagaacgttttttgcttgttcctcattacaaccaactttgaaaccaggttcgatagggaggaagttccagaggaaatcaacacttccttcaacgtcatctttgcctttttccagcatcgctaacagtaaacctttgtttttgatgctgtttacgattgcgtcaaaataaccatcgctgaaatcaacattcgggttcagcatttcgttgtaagggttgttgaatacgttcattttgaatctcctttgtttaactcagtatcttgtctacgtgagttatattaccacaatggagattcaggtcaatacctttttacgattttttgaaaagtttttcgtatttggcttttacccagcgatacatatcttcggccttgtcactggcaatcagtgagaacagcagatagatcgcaacacccaccaacacaacgcctactacaatgtagacgggtaatagaactgggaagagaacccagaaccatgacatatgcgagaagccaaatactttagccgctgcaaaaatcagtgtcagtccagtcagaagtttgatagccggaatcggaatcgttatagtcttagtcatttcattaccttacattctttatggggctattcgccccagtcaattaaaattgaatgtcagattttgcaatctgcgccattttatcacgtcgggtggattcagcctgtttaatcatcgggccttgtgtctgttctactgttttaggcatagtgttgccgtggtagtcagatttaaacccgtattcgctgttgtcggtatccatccagcgctgattacccttgcgaacttccaacttgaacttgttgaaagtgttcttatcgccataacgggatttgatttgcttgaacagttgcataccctgatcagctaactcttccgtctcgattacagctaacataaaatcagccgtagcaggtaaaccagcggattccgcaacatcacccatactcacatccgaactatcccatgcagaacgcccaacctgtgcgcctgtccacattacggtattagtttcaacagcaagaccgcgtagttcttcggcaattgctttaaccagaatataggtattttcagcacctttaacgcgggttgaagtacagatccccaggtaatcgacaataatcacatccggcacaaactgtttcttcaatttaagctctttcacaagcgctctaaagtggtttgcacccgcaccagatgtagggtactgcttgaccaccaaacgcccaaccttacccgctttaaggcgctccattttgttcttatagtctgcgtatgtaatgttcccttcgtcgatgtcatccatagtcacatcaagaaggttagcatcgatacgcttagagcaaacatgctctgccatttccatagaaatgtaaagaacgtttttaccctgttgcagataatcagccgcaagagaacataagcccagtgatttaccaacgttaacaccagccatgatgatattcagtgtaccacgttccgcgccgcctttggtgattgcgttcaggatcgggataccaaacggaattttcatcgcttttgattggtaaagcatccaccgtttttcataatcttcgaaatagtcatgacctactgaaatatcgaatgaaattgctaatgcttcctccatgatttcagggatagccccaacaccaggaagtttcttgttctgttctgccagtggtttttctgcgttcgcctggatttcgattgcacgagaaagagcacgatacattgctttatctttgcaatatgtttccgtttccttcattagccaatctaaatcttctggcgcatttttcagcgactgaatcgcctttttcgtgtcttcgtagactacatcacttagatttcgtttgtcaagcgcaacctctaaagcagtttttgacggaatgccgttgaattcctgtacatgtttatcaatgaggtcaaacaaaacttgcgcattgccttcgaaatattcctttttcagatggggccatgcttggacaaaatacgtcccgttataaatcaggttagaaaatattgtatcaacgatcattgtattgccttataccaggttgctgaacatcatgaaaaagttgtaaaccttttgtttgaatacatcccataatgtcagcttaggctttgggacaactgaacccttttcaagctctttaatctgtgcataaattgcatcatgcaccagcgggatcaacgcttctttgtcttcgtctggggtactgaattctactttcagaccatgatcccaaaacaccttatgaatataaaccagatgcgcaacacctttttcatcgttaatcagaagttcctgaataacatctttcatcgcttcatcaatataattctttgctttgctctcgatatccatacattgcctcggttatggggccgaagccccatattttttataaaatttcgtcgttttcttcgatatcatcaaatgattctgggatatcgtcatcatccagatcaggatctggaatgctatcagtgctgtataaatcttccagcgcggaaccatcactgatttcacgatcagggatcttatacttttcttcgatagctttcaagaatggttgatgagtaaacagaggacgccagaattcaacgctatttgtttctgactcacgccatttcttttcttcaacttcgagttcgccagtctcggtattcaggaaagcacggttgcgccagcctttggttacggtctgtacaaagttcatttccattgccagatccagaaggccagaatacatactaataccgccttcataggtaacatgcagcgggaattttgatttctctttcacgaatcgagatttttcgatgttcatgatgaaatcataacccactacctcagtaccttctttcacctgttgtttacccaggatgatcgcagtatcagcggaatacattaaaccagtaccaccagaaataactttcttgctgtacatttcttgtgtgtcgtaggtatgacagatacaaaccatcgggatatccagatcagccagataaggcgtaaccatacggaacataccttttaatgcttttgctcgcgtcatatcctgtttatcgttatcagaaagcgcgtcagcaagttcttttttacttgcagtgttgcctactgagtcaacgaatacaatcaccttatcaccgcgttcaagcgcgttaagctggcttacaacgtcattacgcaactgctcgaccgtcgtgatacgagtatacacaacacgatccggatcaacacccattgatttcagataggatttagtaacacctttttctgaatcgtagaacaggcacacagcatcttcatacgttttgagataagccgctacagtcagcaaacctaagttggatttgaagtgtttggacgggccagcgaaaagggtaagaccagaagttaggccaccgttaaacgcaccggacaacgccagattcagaatcggcacacgggttcgcgtgatggtaatattgttgaatacgtcgctttcagaaagtacagatgcagtttggctattcgagtttttgatcagtttttttagtagtgctttgtttgacatttaatttttccgatttattcattctcattctatatatctcactagttaatgaaaggggccgaagcccctagagtttaccagtcaccgaacagatcgtttaaactggcacgtttttcataatcaattttacatacttccgtgatattagtcaatggactaataacatgtttttcaaacatacccggataatctacccatgccagaatatcactttcgatctctgacggtagtttatttccggattgccacgcgatgcaatcggcttgccacgggtttttatcccttagtggtagaaccattaccttttcaccttccatgattggcgtaacaccatcaataccagcagtgaaacggttaaagaaaagcacccctttaatatggtttggtgttcccttgattggatagccagccccatcacgatatttcgaaatgttgttggcagatgatacaccagcaatttccctgtagtcaagttccttatattcttcttcgaactttttataatgttcgtgcaaagataattcaccttcttgcaggatacggcggatcgcttctttcaggaatactttcacagaggtcggagtactcgatcgctgtgtttccatacccatgattttcagtttcggtttttcatagcgggttccttcggagtcccacacgttagccgcatatcgttttttagcagtccagaaacttcccaacccttcggaacccaacggaggcccagaaatgatttcacgatccataaacatcaggtgttccacgttgttcatgtattcgcaaagttcacgataccctttatcgatcatcggttccattctttctttagcaaagcgatccaggaagtcaacccaatggttattatccttaaatttagcctcaccaccaacttttgcaatcacgttatccatgcaaacataaatggagtcagtgtcacagtaccgaacatatgcatgatccgtagtaccgcacaggtcgttaaggtattcgtttaccttacgttcaatccactggatagccaactgcccgaacatggtgatcgcgctggcgtttcgtagatcgaagtatcggaagtgttcgttacccaacgcaccataaagggagttgatagaaatcttacggttaagctgtgctgtgttcgcttgtgcgatcttcttctcacacacgcgcttaactgctttaagcatttgttttgtaagagttttcagaactgctttcgattcatcactgaaatctgtatagaaatcaaagtcaggatcaaccatttggttatgtgcgtctgttaagtgttcgagttcgtgcttgatgagttcaagatttcgctcacccgccatcattcgttttttccacatcttacgctgatcaaatactttcttgatctctacggggatcacgcctttgatatcacggcggaacatccacccgttaggagaacagctaaattcatcgctagggcgcggcgcggtcttattaatatactcttcaagagcacgtaccgcaaaacttcccataatcgtttcagggcttatattcacctgtcggatgatggaagggtacaggcttgttaagtcaaacgataccatgtatttgtaaggcccaggaactggatccttcacaaatgccccagggtaaggggttttagtatggcgtctgttttccggaataacaaccttatcttcacgcagagagttataaatgatcgcgtcccacgttttcagcggagacataacccctgggaagttaatttttgcatagtacgctacagacagaaccagttcaataaagtttcgtttaccgtcaatatcaagtacgcggataacgtcaacaatgttgtacgtgatgtacagttggtgatctcgctggcgtagttcagacagtgaaccttcatactcaactttatttttaccagtttcgtattccgcgatcgcgtccagacggtaagatggttgtggggtaaaactgaatttcttatacagcgccataccatccatttgagcaacgccggaaatgtcatatcctaattgttcgttgccgtaagcgtcggtagtggttctggcggttactttaccaaatgggctaaaatgccttaccacgttttgaccgaaaatgttcaggtatcgcgtgatgatatatgcaatatcgaatttgtcagagttccatccggttacaataacaggggttcgctctttccaatctttgatatacgcagacaataacgacttctcggtctggaaagaccgataaacaattttgtttaaatcttcttcgctaatgtcttttcgatcaacgtttgccgcgcaccattccgcaaggccaccctcaaccagatcgtatacatagaatttatcttcaatgctatcgtaatgggtaatcgcatcgattggatattttgcttcacgcggatccggaaattctggggcggtcacctcgatatcgatagaagcaatgcgaatgtgttcgcggttgtattcgatttcattccggtacatgtcagaaatgtaagccagtcgataatcgtccatacctagcgcttccatcccaacatcgcgcatacgctgcatccagtttttagcttctttgatgctgtcaaactgttttttgaggcaaggcttgccataaatgtctttgtatggggtttctacgccattcatagcgtgttgatacattacgggcgcatatttcgtcttacgtacctgttcggtgccgttagagtcaacgaagcgctcataaatggtatctcccatttgttcaactgataggtaaaattcattcattggatcttgtcttctccattaatataatgttccattgtaacaccacctacagcaaattcaagtttactcgatgttctaaaaccaacaaaccttctgctaacaagtcacggatctttctcagttgaacaagctggcgttcaagtttaaacccgtcgaataacatgctaaaaatactggaattgatactatgatattttgcttctgcaatgccatgattaaccatcatgatagctttgttaaccagtagtttcctttccgttactgtatgttcatccagttgacaggttgcaagggaaaccagatcatcataagcacgttggtcaataacgttatccatacgggccgcgaaaatcttattcatgtaagtgcggatcattgcgcgtcctccattcttttcataaagacttcttttgcttgttggatcaagcccagagattttttaatacgctcatagaaatgagtggtttcaacttgattgcataacaatgtgtactctgaaatgttacgatcgtaaaatccaggaaagtagtgttgtgcatagctgtaagtgcgggtatctgacagattgcaagttaacgataacaagatgtcatcttttacaatcgggatgatcaaagtttcgttggatttgattgaatccatgatttcgttaatagtcataatatatccctctcaatggtgtacaccaaatataacaaagcccctgcacgaatgcaagggctttttgattagtgaccgatccggtacttgtacttgaggatccaatctgctttttgcgagtgagtcagtacgcggaagttgttttcttctgcaaacttcaacccagtggttacgatcttaaccatgccccactcttcgagaagtcgcgcaatgttgttccggcgtagttcgtcttcttccgtcatatcgacttgacgaccatcaagtttcaacagttctttaaaatgcacgataaaatacttaccttgctttttcagaatgtggcacgattgccagagcattttctttttgttgttcgcaataccaatacgggttagcgtttcacggatctttaaaaaagaatcgtcgctgattagttgaatttctaacatacatcaccattgtttaatcaatttttccaatttcttttgttcagctttgtttttcacaatacccaacaaagacagagcgacctttgcgtgttttcttttccaatcctcgaacattccgaggtctttaagttcctgcaaatattccatcgctgtacgtgtatttacactgtatttttcgcgaaggatttcgataataattttctcttcaaaatcttccgatagtttagcccatgcaccgaagcgtttagccttcctaacagagttgagataatagttatagtgcatttggtcagagatactaccgcctaccagattcatcacatacgcgttgtatatcgtgtctatgtgctggctcattgcgttgtctacaaagtacttatcatacacttcatcgataaccaacggcgttttgccgttgttgatttcgtctatgatgttaaacaaggtgttttctttatccttgccgtactctttgaccagttcttcaaccttatcccaatctttagaaagccaagcggattcatgcggggataactcttcttcatccagaaattccgccaggctcatgattacgcctcccagaccatagaaagcatcaggttcatcaacagatattgcagatgaatttctttattcatcgccagcccgtattgcgcgttgttttcgcctacaatctgaatcagtgcgattttagaatcctgattcacgataggataaatcgtatcagtcaattttccgataaaggtatcgtattctgacgcatatttaataacctcagagcgcaaccctttatagttcttttctttcaacagggtaatgatatgagacacatcagaaccaacgatctcatttaggatccccgcatcaatttcaccacgtttcgagtagaacccgatcgctttgataatagaacgcgcatccggataatgctctttaacaaacgctgcaatgactttaggatcatacttgatattctcgatttcaaggataccgaaacaacgcttgattaactgtttcatcagttcgatacgttcagcatcagacggaacaccgaatttaacaggaggacaacgagaaagcagagcactatgcacaccgttaatgttgttcgctgttacaataacagaaacgtttttactgtatgcttcgataaagctacgcaagtgtttctgtgcttccgccataccagaacgatcgaattcatcaatgatgataatctttccgcctggtttctgcgtcattgatgaagcaaaacgatccagttcattacgaatgaagtttacaccacagttcgaaccgttgacaaagaacacctcagcatcaacctcacgggccaacacaagcgcgagggtcgttttaccagtgccaggggaatcagatacaagggtcatgttctcaacacgcccagatttgattatgccccgcatagcggctttgtcaccagaaggtaaaatacactcttcaatcgttgttgggcgatagcgctgatcccatgcaaattcatcaggagatcgagagattttaccgtatttggtttcgatgatttcaatattttcactaagttccataatataccttcaaaataaatggtgtaaaagaaaggggccgtagccccttaaaactatcttacttgaatgtgctacttgcttcaagtacgacgacgtaagcaacgccgttatcagaagagaattttgcggcccctttggaggaaatctctactttgtaatcgctgttgatgaactgcatgttatcaatcttcatatcaaaattgaaaacattgtcgccttcatactcaccgacttcaacggagaaagttgattgactttctttgcttttcgcggtgatgaccagtttaccatcaatcggttcaacggacaggtcggtcagtttcatcatgcgagacgctttgatcagtttttcgaaatcgttagaggtaatctggaaaatcagatctgctactggcatcaccagacgttttttcggtttcgggatcgttgttgcgtctgctgaacgttcgatgatcttcatcttgtcgccgcgaatcacaatttcaccagttgaaatatcatgagtgatttccgcgtcagtgccgacgatgttcagcatgttcaggaatgagttgagatcgtagataccaacatcttcatcaatcacatcagcaatttcagcttctgcgtatacaacgctgttgattgatttcgtcatgatgaatgaacctttggtcagcatgatcgaagagttgatttgagaaaagtttttcaggatatcaatagtttgtttagagaatttcatattcagcctttagttttcaataagtgttacttaataagtgattttacaacggtttccgctgctgtgtcaagcatatcagccatttctttaacggttgtacgcttcggatcttcgcgtcgttcgctggtaagtttacgatgttccgcaaccactttttcatcaatgtcacgatagtgtttaaaacgttcctcttgaggcatagctttaaacagttcttttgtttcgtccgagagtttagcaacccaggatttacggacgcggttcatgtagtcaacaaaaacattactttcattcatatatttcttctctaacttagaattctttgagtgggggccgaagcccccgcttgtattacatgtctaacagtttatccaggtcatcatcaccggagctatcagaatcatccagatcgaacggtacgccgtcatcttcgcctaccggaaccgatgcaacaccaccagatgatttcacatcagatgtctgattgtcaaacttagccatttcgttatcgaagttgctcagttcgctatcaaggtcagcggaagcgctggaaccagcagaaccgatcgaactacccataactttattgaagcgagtggtcaggtcagccagcggtttaaattcgctttcagcggtgatcgggcggagatcgctcataccttcgaaaattgctttctgaacttcttcatcgtcgatgtttttgatcttagccggaacaccaaacgagctatcgtcatagttaggccaatcaccaacttttttcgctttcagggtgaagttagcaccatcaaacggacaggttacagcaatacccggttcatcaagttctggattaccgttaattgcggcggtgatcttgtccatgattttcttaccgaagcggtatttgaacaccttaccttcgttttctggagcgcctgggtctttaacgaccaggacgttagcccagaaactttgtttacgaccgatctggctcagtagcttatcttctggcccgtttttgttggctttagccttctcatacagatcgttttcggaaatgtacttacatgcaggacagccgtcataatcgccgtgggtagaggaacagttctcaatgtaccactggttgtttttcttgaaagagtggctcacgatacggacgaacgccagttcatcatcggaacgtgctgggaggaatcgaataacggcggaaccgtttttctgtgcgtccagggtcagtttccattctttctcatctttctggaagccggaaccacctttcagatttgctacctgtgcctggagtttagcgggatcttgacgtttaaaaatgctgctcatattctgttttctcgtttagtttagtttgattaacgtttgtttcattaagtttcgatattttatgatatctttttcagtaaggtcaaatatttttctgtatgcctttaacttaatgctaaagtcagaccaaataatatcatcagctacttgatcgtgtttatttatgatacctaaaaatgagtcaaaaatcaaaaacgattcgtaagatatcacatttgacaggacaagtttgcttatgtaggacgttgatgatttttcgctgtacttgaacaccagagacacggggatctctttcattttggcgaattcgtacacgtttttaacgtcatccacaaacacgttatctagtctttgtaactttcctatgtactgcctgtaaaagacaatactatcttcatcaacatcgcctacccagaaatccggattggctacgaagttggagaggaatataaaatagatttctttgaatgtaaagcgttgagctaattttacaaagaaatatctatcctttcgcttgttaaaggcgttttcactaactttgatctgccagttgtattgaaggacatcaaaacgcccctggaaatgagttttcatcgccagatataacttgtatacagacaaaggcacaagccgtgaattcgcctcgctatcagcaaacggagctttgaatctcacatgaagccgtccagagtggttgatgaactatgttcaagcgcaaccgatgggcgaagcatgtttcctttgatcgcttcgtcgctaatcttatcaaggatcgcgcgaggaaccgttttattcagcatcgcataatcaatagaattttcatccatccattgtagcgttgcttccatgtaggttgccccctcagaggcaaccagattttcgatatacaaaccgacttcggtcttatttccgatcatgctttacgccttatcgatcatatcatacagttcgatcagttcgttgttttcttcttcgaaagcggtacgggcctgttcgtgatacagtttgaacagtttcccgaaggtttttccatcgataccgaaatcggttttcgctttggatttgatatccttgaacgtgccgttgaagatctcaacttgagttttcacgttggatgcttctttgatcagttcttttacctgttttgctacatcagggtttgtttgtaaaaattctacactcattttgttacctcaaaaatcactcagtttttcgaacatacgggaaagtttgttatccatgaagtaacgttccattttggctttacttccggattttggagtattatacgcttcaataatcgaattttcaatatcttttggtataaattcgaaatcgcgtagttcctcattttctttgtaacgtgcggcccattcaggggtcatcaatgttgtcggatcgtctgcctccagccatgcctctaactcagaggattttaccgctggggcgcgttcaccttcaaccttcgtcacaatataatcatttctaattttaatgcaagcgatactatcttttttatcgcctttgatatttttgtatcgcagatcgttacgtggcgaaccgtacttaggcgttacccattttttctggggaggcgaccattgacgaacaccgttatatttctgtagttgtgtaaagtcgctatcagcagaaaccactaatactcgtctaccttcaccaacagcttttttcgtaacaacagcaattatatcatcagcttccgcgaattcaacctttaatccgagataaggcatattctgacggatttcttcgaacacaggattaaggaagttgttcagacgatcccaatcccattctgattcttcgtgttcgatctgacgacgttttttgtagtaccaggctttttgcctacgccagtaatttctgtcatcgaaggcaatcacgatttctggatactcacctttaaattttacaacgttaaaccgtaaagtgtcaagcaccagatgacgaatcatttcgatcgtgatggatgcttgttcctttggtttgaagttgttcatcagtgtagcgatggaaatgttagagatatcgatgaccatagtatcatcgggttccccttcatcttgcatcagcttgttcaagttaaacatgcttgcaaaactgctcatacatacctcaatttttcaaagaacggggttattgtagtaacttacgaaatgaagtcaatacaaaagaccataaaaattttgatcaataatacttgatctgatcaaatttatgatctataatttattaattaataattattttactacaatgatcattgtaggtcaagtactaaaatcaataaattttatataatttagatctgatctatagatcattagatctactttaaccttaaataatatagaatgaaatttgattttgtctacagttattatataatattcttaacttcaaagaggaaatatgaatactatgactaaagaaacaaccaatatctacgcagacaatgaaaaattataccctatcctctgtgcatggaaaaagcaaatcgccgaaacaggtgatcgcaaaatgcctaatgagttgggggctgctattatggatattgcaaacgggctatcacgtcgttacaacttcaaccgttattccgaagattggaaaatggatatgatcgatgacggaatttccgctgcaatctcaggactgcataacttcgatgaaactcgttataccaacgtttacggttacattaacaaagcatgttggcaagcattcgtaacacgtattctgtacgagaaaaaagagaacgcgaagaaatataaattcttccttgagcacgtttacgactgtgaagattcagatatggttagtattgcagacgaaggtttcattcaagatctacatgacaaactatctcagtacgaggcttccgccaccaaaaccaaagacaaggaagcggaagtattcccaacattggaagattttctatgaaagcaataattgacttaaacaaaatattaactgatatcgattacgaaattgacttgctaccctacttcgtaaaattagagttgcaaaacgtgggaatcccggttatcatcgatccaactgacgtaagaaaccccgatttcgaagtagaagaaggggttttgtcttatatgataaacgccgaaactatgatcatggagatcacttatgattgatgaagagaaagaagtactaaccagtgtggaagaagtggatccagaagaggaaattcaacaaaagatccaggaacgtgtagaagccgacgcattgaagcgagcacaaaaattcattaagaagaaccggactgagatcaaacgcctccgtagacatgcagaggaagccctattcaggggtaataaagttcagtatgtgtatgcggttaagaaacttcgtgatatgctcaaacagccgtatacagaggatttcattgatacgatgtggaacacttcactagcatcaattcgaaatatcgtagcttcacaacagaagcactaacaaacaagtagccccgaaaggggctatgagggtcttatgagaaagtacttaatgatcggggatactcacgctggcttgcgtcaggacaacccctggaatgaagaaaacctatacaatgtattcgtacaaatcgtagaacactgcaaagcaaacggcattaccgaggctttccatgctggtgatttctttgatgtgcgcaaggccaccacacaaaccacgatgaaattcattcgtgaacgtattgtgccactactggaagaagccggattacatatctatgttctggttgggaaccacgattgccagtttaaagacaagatccgccctaactcaccgcgagagattcttgatcagtatgattgcttcacggttgttgatgaaccgatgacagtaaatcttgatacttctccgctgcaatcaatcgatttgatcccgtggatttgtcaagaaaacacacagcagatttttgatttcatcaaaaagtcaaaatctcaatactgcttaggacactttgaactgtccggatactatttctataagaacagtaaagctgaacatgggcttgaacctgatttcttaaagaaatatgatatcgtgtattcaggccactatcatcacgctaacgaaggcgctaacgttttctatatcggtacacctcttaccatgagcgcgaacgatgaggacgaaaccaggggcttctatgagctatcttatggcgacggtaaacgtgaattaactttcattgctaacccagtatgccaccatcgccggatcacctatccggatcaaaaagatgttgatgttgcagattacaaaaattgctctgttcgcttgattgtacgcgaagttgataacgatttgcctaagtttcaaacaaaactggaagaaacagtttatgagttgaacattgtcgatcgtgtgatcactgattcagaagttgatactgactttgaaatcaaaagcgtatctggattgattagtgagtacatcaacaacatgcagatcactccagaagaaaagaccgaagtatctgcaataatgagtgcattgtatgcagaggttacgagcaatggaaatagttgattacgttaatattttaaacgaagaagggcgatataaagccctttataaaatgtttggatttgatgtgattgttgcagtacagcaggattcctataacgagtatgtgtcattggggttcactctgattaaagacaactatcacgaaacaaaggtttggacatttactgtcctgaatagcatggatgaagattccgtgatatactgctttgatagcacgattacaaacatgattagtgatatatcccaaaggataattgatgaaactcaaatttaaaacattgacttatcaaaatatcttgtcggttggtaacgtaccgatcgtcattgattttgattcagcaaagaaaaccctcattacgggtaaaaacggcggtggtaaatccaccatgatcgaagcgcttacatatgctctctttggtaagtcatttcgcgatctgaaagtcggacaactggtgaacagtatcaacaagaaaaaatgtctggttgaactgttgatcgaatacggcaatgatgaatataaaatcatccgtggacaaaagccgaaagtatttgagatctggaagaatggcgaaaaactgccggaagattcagccgctggtgattatcagtcacagcttgaatcaatgttgaatattaacctggtgggctttaaacaggttatcgttctgggtactgctggttatgtacctttcatggaactgaaaacaccagatcgccgtaaactggttgaagatttgttgtctttgtctatcatcagtgaaatggacaaactgaacaaatcatacatccgtggtgttaaccgtgaactggatacgctttcaatgcagattggacacgtacaacagcagatcgcaacacatcaaaagttcattgacgaacaacgggcaaaagcaaatcagaatacggcgcgttaccaggatatctacgattcccacgtagaaacagcaaaacagattaaagcgcaattagttgaacttcaaacccagatcgcagaatgcgtgatcaatggtgaagaccaaacagcaaatattcaaaaactgcgtgatggctatacacgcctctcaatgaacgtagaacagttgcagcgtcttgaggtgatgtatcgcaagggtggtgaatgtccggcctgtaaacagccaattagccccactcctgaacgcatggaagaaattgccgagaacattaaaaacggtactcagaaacttacgctgattaagaacaagcaagatcagctacagaaaatcatggatgatttactaacacaacaacgtacactaaatgggctgaaatccaaatacgaatcactacgcggtacacttcaaaatgaagttgcagcggctaaacgtgttcgggctgtcatggataaagcacaggaagacgtggtgatcgacgaatccccagttgaaaaactccgtgaagatgaaaaggaacttgattctaaacgttctggatttgtcaaggaaaaatattttagaggtattgttacggatctgctgaaagattccggcgttaaagcgagcatcgttaaacgttatattccttacttcaataaacagattgcgtactatctggatctgttgggtgctgattatcagttcactctggatgacgaatttaacgaatcgattaaatcgctgggtcgtaatgattttagttacgcatcgttcagtcaaggcgaaagagcacgtattaaccttgcgttgcttatgacgtggcgtgatgtaaccagtaaaatttctggtgttgatttatctctcctgattcttgatgaaatttttgatggtgcaatggatcgtgaaggtgggtttgctgtgagaaaattacttgatgatattgaaggtaatgttatagttatcagtcatcaagaactggatccgcaagatttcaacaggcatattactatggctaaagttggtcgatttactaaatgtacgattgtaaacaatgattactaaaaaatgggacgacgaatttcaagccgagattcgtcgtcggttttaccatgtaggcgggattttgtatcataaaacagagagtagaccaacggtgtctgttcctgctggttactattttaaacccggtgatgtggtaaaatttaacaaaacgagaaaaaagaatccgtacttacagatttgtatgaggtatgaagggaaatctaactatctgtacgtgcatagagttgtctggtttttagaatacgggtatcaagttgattttattgaccatattgatatgaatccattcaataatgatccttctaacctacgagaagccacgacgcaacaaaatcactacaataaaaaaggaaaatctaacacatcctcaatatataaaggtgtatcatgggataagccaacttgtaaatggaaagttggtatacaatacaataggaaaaagatccatttaggatattttgacgatgaaatagaagctgcaaaggcatatgatgctaaagctatagaaatcagcggaaaatacgcgaggttgaacttttcatgaatatgttagaaaaatcttttgaattagaaaccgctccggaaatagagcggttttatctccacaacaattttcttgaagaaaaacatatagttactatgaaagatgttgaagaagcattcaaaaataatcctatagagttgacgcgaatcaagaacaacaaaagttctgtttggttcctcgaaaaaatctattgaccgaaatccataaatacagtaaagtagcccatgtaacgaaacgtgggctttgtttttatttgaggaacaataaatgatcaccgaatccaaaatgacttatcaggaagcactgaaagttttgggcgcaactggtagcgaaaccagcgctgaaatgtccagactcttcaaacgtgcatccttacgcaatcaccccgaccgtggtggtagcaatgaattaatgcagaaaattaaccaggcttatgacgtcgttacaaaaactgggcctagtggcgcacgttctgagactgctggtgatgttcgcgcacgttatgcacgtcaaaagaaagaatgggaagaaaaagttgatgcttactttgtagtggcgaaaaactatttcagcaccaaatttaacgcacaggaatttgcggaatacttcaccaaatacactggattgcctaccactttcaaacaggaagtaacaaaaggtagtcacggtgtttatgcttcgttccgtttcacttctggtgatgcttactttgatttcggtttcaactgcacccctccgaatggacaagggttagccgctccggattcatctgcactgggtagcgtttctgttagtacctttgtactggttggaactaaaaaacacaaaatggcaagccgtgattatcaatggggcaaaaacccagataagatcactccggaaagcctgttcccgtctaaaaaactggaaagcattttcagccctgtacagaaaaatatcaaatacaaacgtgctgattaccttgcatcattccgtaagctgttaggcgctgacattagcggaaacgatatctttgttgaagttggtacactgaaagttcgtttctatcgtcacgtattcatgcgcaaaggtgcttatgtgtttagcgcggtgtatgatcctgctgtatctaagtatcgtccggctgcacaacttcgcggaactatgttcgaagatgaggacggcgcttgcctggatatgatcgttgatacgttcaaagagttgcagaaactgaaaccgagtgttcaaggcgttgtgaacgcgatcgataagatgaacgcagagtttgcagcgggacatcgttcagcatcttttgttaaacgtgtagctgctcaggaagccgcaccaaaaccagaagagaagccgaagcgcacagttaaccgtattggtaaagaggaatacttcgcagcactcaaagatattggtgctcgtgtaatgcctaccagcggttatgttgaatttgataacggcgctggtgttactatcaacttcaagcgtattgttgtaaaccgtaaagcatactactcattcagtagctttgatttcacgtactctggtcagaaacacattgagtggttgaaaggaatcgatatcgcagaagataccaaaggcgcaagcattagcctactcactgatactctgaaatctttacgtgggatctctgactggaacactgttaagagcgctttagatcaaatgaattctaacttcaaggcgggtaaattctccgcacctcatgtgaagaaggaagcagagcaaaaagcaccgaaacagaaagacgaaatcggcgcacagcctaccaaaccacaggcggctaagaaagatacaccggaagtggaaaaatcacaggctgttcatgcagcacgtgagaaagcgaatatgaacaacactattcgtaaaatgatgactatgttagtcaaagcacagcgcaaagacactccggaagatatcaagaaggaagttgatgcagcaattcaattgtggcgcttgacttattaatcaaatgaactataatgggaactgttaacgcagttccctttttatttgaggaaaatattatgagttgtccaacatggttacgtttggaaaatctgaaagaaggtacacaaaaacggatttatattaatcttggttgggttcctcctaccgattttcaaatggctgagattttaatcaatgctgttaaagaagtaagcgacacttacgaatgggaaaggctctattttcctttgattggtttgtatatgacgcgaaataaatttgaagaaatgaaacttgctgttattcgcgctacgattattaattcccaacaaagatttactttgaaaaatgcatggagttctgaatgattattcaagtatctgtacagggtgacactctgactgtcaccgaatccatcaataccgctcttgctgtatgtcgtgaccatatctcacaaaatcctccagtgactgagatcctggaaattgatgtttgggatcagattgggatgatcgacgcatcatatggatttaccccgcgagatgaagaactatctcgtatcgaatcatggctgaatgaacaggaaacggaatgaaactccctaagaacacaacactactaacccgcgaaaaacttcactctgttgattggtgtcctctggatatcatgatttttgatattgaatctcgcgtgatcaatgcaaaatatcaggggtgtagtattttctctgttgaattcgagaagattcgcggatatgatgagaagtacaaagaaaaactgaaagttatgattgaagcattaggctatattgtaactgttgaagacaacaaaatgtggatcgcaatatgagcatagtaaaagcggtgtttgcattgggaattgatatctatcacgatgatttcgcttttggatatcagcaagggttgccgtggggccactgtaaagaagatttgcagaacttcaaagaagaaaccgcagatagcgttttgatcatgggtgcaaatacgtttacctctcttccgggtaaacttcctggtaggatccattgtgttctgtctggttcaggtagttttttgaaaaccaaaaaaggcgacgttgctgattacgtgatccacggtggcgggttgtctgctgctattggtacaatgcaagcaacacacccagataaaaatgtatgtgtcatcggtggtaaggggttgcttttagattcaatcaataataaaatggttgatgaagtaattttgacaaacatttacggacatcatgtgtataacgcaccagcgtttaaacgtgatgttgcatttactctttctgaactgggtggcgcattattaaaatatgaattttctgatttaaaaactcagtacatgaaagaacatgaacgcattgaaaaaatcgtagttgaacgatataaaaaggtataaaatgaaacaatatctggatattattaaacttgtacttgataacggtgttgaatcaactgatcgcactggtgtaggtactattcgtattttcggcgcacaagcccgatgggatctaaacagaggtttccccgcaactacctgtaaaaaactattcttcaaaccgtgcaagcatgaattgcaatggttcctgtccggttcaaccaacgttgaagaacttcgccggatgacctggggtgaaaatagcgataagcgcacaatctgggatgataactatgaaaaacaagctattgatttaggatacgattctggttatctggggccaatctacggtcatcaatggcgttcgtttggttctctttatggggatgatgatagttattatggcggtagtggtgttgaccagatcgcaaaagtcattgaacaactgaaatcaaccccagacgatcgcgggatcatcgtttcggcatggaaccctgttgatcttgatgatatggcattgcgtccgtgtcactgtttctttcagttcgttgtaatcaacggtaaactgtctctacagtggtatcagcgttcagttgatgtcttcttagggttgccgttcaatatcgcctcctatgctctcctgacgcatattatcgctgatatttgcgggtatgaagtgggtgatctggtttggactggcggtgatgtccatatctacaaaaacgcagtagaacaagcgaaagagttgttgaagccggaacgcgcaccgcttccacttccgaccctttatatgccgaaggtaaatagcttacttgatttggatcaagaattctttgactccatccatttgaaagactataatcaccacggctcgctaaaagcagctatggcagtataaacaaagggggcgaaagcccctttcttaacaaggtaagataatgagtgatattaaaacagtagtgaagtcttctggcgtaagtcaaacgttcgaaaaagaaaaactgttcaaagtccttaattgggcgagtattggaagaaatattgatgttaacgcattccttgaaagtgtcgttgacctgcttcgtgatggtatgactaccaaacagatccaggctgtagcgatcaagtatgcagcggatcgaatctccgcaaaagaacctgactggcagtatgtagcggctaacctcgaaatgttcgcccttcgtaaaaccgtttacgggcagtttgacccgatcccgttctacgaacacatcactaagctggttgaggctggaaaatacgataaagaaatcctgacaaaatggactcctgctgagattgattatctggaatcaaaaatcaatcacgataaagattttgaattctcgtatgctggcgttcagcagttgatcgggaaatatctgttacaggatcgcacgtccggcgacatctacgaaacaccacagtacgcattcatgctgatcgcgatgtgtctgcatcaggacgaaaaacacgctgataaaatcagtcatgttgttgacttctataacgcgatttcggatcgtaaactgtcattgcctacgcctattatggcgggtgtgcgtactcctacgcgtcagttctccagttgtgttgtaatcgaatccggtgattctctgggttctctgaacgctgttacgtccgcgatcgtgaagtatatctctcaacgtgcgggtatcggtgtcaacgccggacacattcgcgctatgggttcaaaaatccgtggtggtgaagcagtacatacaggcgttatcccgttctggaaacacattcagacggcggttaaatcctgttcccagggcggtgttcgtggtggtgcagcaaccctgtattatccgatctggcatcttgaagttgaaaacctgctggttctgaaaaataaccgtggcgttgaagaaaaccgtattcgtcacctggattatggcgtacagcttaacgatttgatgtataagcgtttaatcaataacgattacatcactctgttcagccctgacgttgcgaacgatcgcctgtatgacgcgttctatcaagcggatcagactgagtttgaagaactgtataccagtctggaaaaagacccaacggtacgcaagaaacgcatcaaagcggtagatctgttccagttgcttgttcaggaacgcgcacagaccggacgcaaatacattttcaacagtcatcacgtaaaccagcagggtagtttctctgttccggttcgtatgtcgaacctgtgttgtgaaatcgcgatcccaacttcaccactggatgacgatgataaactggctggcgaaattggactgtgtacgcttatggcgatcgttctcgataatgccgatataagcgaattcccagcccttacacgcatcgcagtacgcgcactggataacctgttggattaccagaactaccctgttgcggcggctctgaaagccaaacagcgtcgttctctgggcgttggtatcaccaactatgcatcctggctggcaagcaactattgcgactactccgaagcatacgccggaaacgttcatgagttgatggaagcgtttcaatttaacctgctggttgcctctatggaactcgcacaggaacgcggtgcatgtggactgttccacgaaacgaaatatgcacaagggctgttgcctattgactggtactgcaaaaacgttgatgaactggcatcacctgtgtataactgcgattgggaatggttacgcggtgaaatcaaaaaacatggcttgcgtaactcaacgctttctgctttaatgccttgtgaaagtagctcgcaggtaagtaactcaaccaacgggattgaacctccgcgcggccctgtgagtgtgaaatcttcgaaagaaggttcattcaatcaggtagtaccaaaccaaaataatcagattgacttctatgattatctctggacaatggcaaaacgtggaaacaaaggttatctgtcgcacgtagcggttatgcagaagtttgttgatcaggctatctctgcaaacacaaactatgatccggctaacttcccagatggtaaagtgaaatctgaaatcatccttgaagatctgctgtatgcaaactatttcggcatcaaaacgctgtactaccacaacacccgtgacggtgcaggtgaggaagaagcggaagattgcgaaggttgcaaaatttgattcaatgccccttcgggggctttttataaggtaaatccatgttaactgtaatgaacacaaacccagatcacaaacacttagaacagcctatgttctttggtgaggatacgggcgtagcacgatacgaagaacagaaacaccgtgtattcgaaaccctgactgaaaaacaactgtcattcttctggcgaccggaagaagtggatctgtcgatcgaccgtatgcagtacgcgaaaatgccggaacacgaaaaaatcattttcgattcgaacctgcaatatcaaaccctgttggataccattcaggggcgcggccctaacctggctttcctccctatcgcttccgatgtctcgatggaaacgtggatcgaaacatgggcgttcagtgaaacaatccatagccgcagttatacgcacattcagcgcaacctacacatcgacccgtcaaaagagttcgataaaattctgcgcaacgaagcgatcatgaaacgttcggcttccatgacaaaatactacgatgacctgatcgcagaatgtcacgaactgaaaaacattgtgctcaaaatcgaaatgttaacgtcccacggatacccagacgaatcgatcgcagagtacgaaaagaaacgcaaagagcaaatgcgtaaatgcaaaatcgctctgtatctgtgtatgcacgctgtcaacgctctggaagcgatccgcttctatgtgtcgtttaccttcacgttcaactttgccgaacaaggtaagatggaaggtaacgcgaagatcatgcgtctgattgcccgtgatgaagcacttcatcagaaaggcactcaaagcaagatccgactctggcagatgggtaaagatgacccagaaatggcggaaatcgcttaccagtatgaagaagaagcgacaaagattttcctggaagtgtacgaacaggaaaaagaatgggctgaacacctgttctctatcggtgatgtagacggcgtatccctgaaaagtacgatcgcttatatcgaacacctgacagatcagcgtatgcgcgcggttggcttgcagtctccatttaaaccaacgccgaacccgtatccgtggatgaacaaatggttgaagtctgacaacgtacaggtagccccacaagaagtagaagtgagttcttacctggttggcaacctcaacaccgagatcagcgacgaagcctatgcaaaatggcgacaaaaatacgcgtaaggagttatgatgattgatgagattcccgtttatacgggagtccatcacaatctatacgcatacttggcaggttgtgttgattgtgatggatggattagtgaaaaaggtaaaaatgggtatcttgttggactgactcagcatattcaactatgggatgatatggttagtattcagtcagatttgattaatgatggagttaacgcaaggttgtatgaaagaactagcagaactgggttaggtaatacattgatgtgcaacctaattgttcaaaaaacaacagatcttttgattcttttacctagaattattccttacttacgatttaaaaaacaaaaagctattgacgcttatgttagtttatgtaaacattcagatcttaatgcaaatgaatccgataacaatatgaagggaagtaaacgaaaatattggaatcagaaagagatagaagaattaattcgtttgcattcagaaggttataacaacccagcaatagggattaaaatgaatcgctctactgattcagtgagtcataaactgtatcgtctgggtatagtgagaaatgaatgatgaaatctgaattcaacttaacccttgataaatgtggtcgcatcgatcgaagttttgttaagtgtggtgaacttaggcattgtgtttattttattgcaattaacgatgaaatagtatatgttggtaagtgtagggatatgtggaagcgtttagacacatatcgcaatgcaaagtattggagagaagccaaccccagtaacatcttaaaaacgtgtcgattggaaatggctatcaaaaaacgaaaaactgtgaaacttatcgtgactactcacgatgaaaatacatatcatgattatgaaatcaacatgatacgaaaatacaaccctgaatggaataaacagcactatgacaaaggcacaaactaaaattatcaataccctttacaaacaactcatgcagttgtgtggtgaatccgaaacatttttcttcgttgatcaagtaaccgtgatgggtacacctgttcgaatctttaactatcgcatggcctcatatacagactggctaaagcctggtgctctggaatgtcgcggtatcatgtttgaaatggatggagatacccccgtatcaatcatcagccgccctatggagaagttttttaactatgccgaggtaaaggcatgggaagcgcttaacgagtctcctattgaattaggcgaagttttagacgtgatgattaaagaagatggttccttgatctcaactttcctggacggtggatttctggcggtcaagtctaaaggttcggttaaatcagaacaagctatggatgcgcacagcgtgttaatggcaaatcgtgaattgctgacccgcttaactgagatcgctaaagaaaactatacggtgaacatggaatacgtttccccgaaaaaccgtattgtcgttggttatgattctcctgatctgcgtattctgaacgttcgtcacaacatcacgggtgaatacatcccttatgatgaactctttgctgacgcgctgttacgtgcgtatctggttaagcgtgagaatatcgaagtactggatctggatgcattcgcaaaagaagcatatcagaatgaaggattcgaaggctatgttgttctgacaacgaaaggttttgtaaaaatcaaaacaaactggtatgtcaatctgcatcgcacaaaagatagcattaccaacaataaggatcttttcctaaatattgttgagaatacggtcgatgacctgaaacagttattcagttcggatctggtctctctgaaaaagattgacgatttcgaaaaacttttccttgatagtctcaatcgtttgagtgcaaaagcgttcaaagccattgaagataataaagggaaatcgcgtaaagattttgctatcagtctaagcgcggatttgtcaaacgacggtcggatcatcttcgggcctcttatgaagtacttcgaagaaaccgatccacaaaaactggtcgatcgcatcattgaaatgatggttaaaaattacgatcagttcattcctggagagtacaagtgaaatcatttggcgcatatagccgaacgatagaacaagaaaaagcagggattgattccctgctttctttcgttgatgttttccccgaaactggaaaaatttactggaatgataaagcatatcataaaagtaagagaggaaaagaagcgggttctattgtttgtgaagaatacccttatacgaaaataaagtatgctgggaaaaattacatgaggcatagaataatattttactatgttcatggttacttaccaatcatagttgatcataaaaatggtcttgattttggtgattgtattgataatcttcaagaatccgatcccgttcataatatattgaagaaaaacaaaaccagaaaatctaaaactaccacatcaaaaggggttgactatcgttcttctcgtggaaaatatagagcacaaatacggattaatggtaaaacgaaacatataggatattatgatacagaagaacaggcgtctatcgcatatgaggaaactttgaatgaatatcaaaagcatcttgggtatgattaatataaaatcgtggatatggcctattattgttgcttgctccctaatagcccttttttacattgcagtcgataccaaaattgaaaatgcatcattacgcaaggatataaaatctttgcaagacgatgtgaagaaagtaaaagagacaaatacaagcaatactgtgatctatgtcgaacaaaaaggtaaggatcagcagttggtcaaggatgccggacgtaaagatctgctgtttaaaaaaccaggactgatcgaaatcaagatcaacaaatccttcgaagagtatatggcggaatacgacaaatgaaaattgcaacgttagcccttgttctgggcgttctgttggtcgggtgtgctgagaagcccccagaaaagattttgcctacgctacccgcaaaggttaacccagtgaaggtaaaatggaaagtaattgcagacgttagagaaatcgacgggaaacaatacctcgtaatgccatatgatggtaatccttatgttgcattgacatatccagattcattgattttacgtagctggatgaatgacgttaaaagacaaaaggatcaaaccgataatgttctgtgtacgttgggataccctgagaaatgcaaatcaaaataaccaaaacgttttttcgtgacataacagaaggaaaagtttatactgcgaaaaaggataaagaaggtctatggatagaaaacgattggaaccgtgatatgtggctcaatcttacgaatgagtataacaaagaactaattgaatatgagatagtgaaatgaatctgtttatgactattggcgttccgggtagtggaaaaactacctgggcgcatgagaaagcccgtgaattgggtaatactgttacgatctctcgcgatgatctgcgtagctctttgtataatgcgggtaaaggtgctggcggatacaaatacaccaaagcgaaagaagacatgattgcagaaatgcaggatcacgttgttatctccactctgaaagatggtaaaaacgtgatcatacacaacacacatctgaaagaaagtgataaaaatcactggcgtgaaattgcgttggaacacaaggcagattttcatattgaatattttgatgtgtccattgttgaattgcttcgccgtaaccacaaacgcggtcgtgatgcattacccgtttcgcgtgtttgggaaatgtttaaccagtatcgtaagatccgtgggttcgtaccagcaatggaaatcgtcaatacccacaatcagaagtgtgtgatctttgatgttgacggtacgctaacaaaagtagggcaacgtagcccgtatgactttaccaaagtgatcaatgatccgccaaacatcccgattcaacaactgtttcacctgtacaaaaatgcagggtataaatgcatcgttgtatctgggcgtgaaggtaatccgcaatgcgcacatgatacatgggttagcctgttaagttatggtgttgaaccggatgaaatttttatgcgtcaagaaggcgataccaggacagattttgaagtaaaagaagaaattttgtttgacaagattttagataagtattatcctgttattgcagtggacgatagagacactccggtcggaatgtggcgagcaaacgggattccgtgcttacaagtcgattatggtgatttctgattgacatataatgtgggtatgttaaagtacccacacaaaagaggattatattatgaacgttattcgtgaagataaacacatcatggttgaacttggcgatcgcattcgcgtagaaaatctgggcgattttaaccaaaaagttcgtttgttgtgccaaaaaattgctaacaaaattcaggaacagggtaaagctccgggcgggtttgaagttagcgccactccggtttctcagtactcctatattgtgtatattcatgacgtggatactaacagcacccaatctttcgggctggtgttaaatcctattactggctacgttacatgggcggctgtattatgaacgtaaaaattattgatagagcggtaattacggacgaatctgtatacccggatcctcgttattatggcggtgttttcggatacatcaaaggaactgatattgatgtagtaacaagtccgattgcagaatatgatatcaacaaaaatcagacagaagttcgcgttactacaatcaacggttcagaatatatcgttgaagcgactcctgattttatcaaacagttactaaaggtgatgaaagatgcttgatcatcctggctctatgagcatggttctcctggaagcattaaaggcatatgatatcccttgtcatttcggtgaagtaaatgttaatactattgttgacgaaatcgacaacccaaatactttcattgcttgtcttgttcgaaaattcacaagttgttttcgtccgagtccagaaaaagtagtgattagttctgtttctgcacatcatcgagtgttggatgatagaaagattcaagtttactggaaagttctttatcacgtggtgtatcatgaagattgatgatattatgtttatgcttagagcaataagcgcttctaagttctctcaatgtgtctccgttaatgttggtgctgcgttgagaaatggtaacgggcgtgtgtttgtaggcgcaaataatacggttgatcctagtcatcgttgtacagatcagtgcaatcacttattagatgataacgggaaactgagtgaagaaaagcgccctgaacattcacaatggtcagatcgcaacgaagtacacgcagaaatgcgcgttattatgctggcggcgtctcatgaacaaatcaaagacgcaactttgtatacaactcattccccttgctcacaatgtgcgaaaaatatcgaattttgtgttgcaacaggtatgattaagcgtgtagtatatctacataaatacgatcgtggtggcatcgagtggatatggcgtctacagcaatacggtgccgaagtagtacaacttgaccccgaagaaatgaataaacatttccggatcaaataaccaatgagtaaatgtatgtctgaactgagtgtaaaagcatcctttgaatatgttctgattgaaaccaacgctaaagcggctggaactgaaattgtatcaccttctggtattgtgactggtgttcgtcaacacggcgaggaaccgatctacggcacagtgttatcatgtgggccggatgtaccggaagaatataaaaccctgcttatgggtaagcgcgtaccgcttcctcatgcacaaatggcaaacgtgccggatcctgaactgattgcaggaaaggcaacaaaagaagaagctcgcaagtatccggttaaatatgtaaccgcacactataaagcgattcaagcaatttacgaataagagatccaacatggctaaacaaattcaagcaatcatcgccgataccgtcgcaaaatccaaaaaacttttcgacaaaggcgacatcctcgaagcaccgacccgcatcgatgtaatgacttcaatgatcattgatgctcaccagggaaaactgaattcccgtgcttcggaagtaatggaatacatcgtacagttcgaggatgtatgcaaatacgccaaagctgttgatccggctgttcgcgaaatctaccgcaaacagttctaaaaatattggccccttagctcaataggtagagctaatcactcataatggttaggttcccggttcaagtcacgggaggggccaccaaacaaggcaaggcacttagagaagcgggaggaacagaatctgattctgttggttgtaggtgcaaatcctacccttgccaccaaatttgggtgcgtagcgcaatgccgttaaatggttcggaatatgcaaccttatccacgggaaaggctctgttggtatccggtaataggttccccggaatgcggggtgaagtaaagaaactcccagcccactaattttaatgaggtttatatgaaatttcgtgaaactgtgaaataccataacgcggtcgaatatacacagatttttgttgatatgtctcccgcaaaattcaaagaacgttatggcatgacatttaatgaatggaaagatggattgcccgatggggactaccgaaaaaacttcaaattcaatgaatgttatgtggatgatgatccttacgatctggatatttttggtaaaacaacgcctctcattgagaattcgccagaacagctttacgaatcttgtattgactctgcatacgaaatttaaagagataacatgaaaaatttacaaaaactgtttaaaatgtctccgacaattagaaaaatcatcggagaaagcaatccaacgaatcgcaataaaaagttgatggaactttttgtaaaagagttcgatgattttgattctgaacttcataaagcgcttgaggcatattccaaacaagggttctttgcatcgccgcaagtgaatagtaagaaagagtatagcgaacgattctttgattgggagattgtcaacctcgttcgtagaacaaatatatctccgagcaatcaccaattgatttctcttgatacttcggtattctttatccagtatcttatcagtggtggtttcaaaaatcctgaaattccgtttacaaatgaagcagttagcagtgaatttgatgaatcatttgtatacatcaacacaaacaaataatcaaatggctatcttcggatagccttatttttggggtgtctatgcgctttttaaagtatgcaagttggatcgtactcgtccctcttgacattattactggagtattagcaattctgtttgccccgtttgttgtaccgttctacaacgagaaaacagggcatcttcctaaaggcttccggtggatggaaaccttcgataatcctattgatggtgatggtggacatatccgccgttgggcgtccatacgctatcatctgggggattttggggtgtacatgcaacgtgttggctggttgtggagaaacaaggcttataacttcgcatatcacgttttaggacgtgaagcgacaagcaaattcaactggaaaggcaacccaaaaacagaaggtgggccgaaccctgtaaatcatgggtatctgctcatgtggaacgaatcagcatggggtttgtacgtttacaaaccgtggctacggatccacaaagtgcaattctgtttgcgcgtttatgctggatggaaactgaaacaagaagttagcgacccagttaacctggatcgtgcaatgctggcgtttcatttcaacccattcaggtattatgtaatcaagtaaaggtaatacaatgaaagcatttcaaattttagaaggtttgcatactggtacaatctatctggaagaaggtaacgacgttcggatcgtagtatcaaaaacattaactatggattctgtgatcggcaaagctcgcgttactccgtttgcaaagcgagagatcgagatcgaatatcagccaactgttaaagtggaaggtggacaacatttaaacgtaaacgtgttgcgccgcgaaactctcctggatgcggttgaacatcctgaaaaatacccacagttaacgatccgtgtttctggttatgcagtgcgttttaactcactgacccctgaacagcaacgcgacgttatcgcccgaacctttacagagagtctataatggcaattgatgatatcaagggttataaaccccatactgataaaaaagtagaaacggtaaaccgtatcaaagatgctgaaaatgcattaggtgcaatcctggaagatatcgaacagcgactatcaaattcagatattgattcactgatagaggaagaattagatgaggtgcttgaacgtatccatcaaattcaactagcgaaagaccgactgaaagaagcctctatgtgggcgtgtcgtgcggtgtttcagcctgacgaaaaatattaaaaatcaagccgttgccgaaaggtagcggctttttcttttttggtgtaaaaagttgttgactcccttctcacattcccttatagttaatcccgtagacaagaaaacacttttatgaggatgacattatgaaacgctcttacaacatgaatgaactggttttcttcaaaactcgtcgtgaagcacgtgcttacgttctggcggctggtaaaaatacttctgctgctatcgatatgggtactgataaagctgttggtgctcgttgggccgctgttatcgttatcgctgctccggttactccggttaaaactctggtacttggtgcgcgtcacgccgaaactcttaacactgctgcaagcggtaggggccacgaagttaaagtgttcaagaagcgttcttatctttcatgtgcaaggggttaactatggcacgattcatatataaagtggaatacgaaaatactgagttatctgatacctttttgaagatgattcgtgatcacgggcaacgtctggaaagagtaacgattgatactgcgtttgattgtcctgttgggttggttctaacattatcttgcagccccgcaaaagaatcagcccgtgtcgaaatgttacataaactaaatgcattttatgaaggtggtagtgtatggcgagtattgtaaaatttttcaccgactcagtgaaagaaattaaaagcgctctggaacaatggaacactcgttgtgatgtatccattaaatcagagtacgaaacaacttatgatcgttatgatccggcccgtggtttgcacaataacccccatgaggtggaagtgtgaaatactacggattcaaaacgagtcattttggtaaagcgtatcgtacagaaaacatcgatcgcaaacgtccgtactatgattctttagtacgagcgggacgcaaacgcgctcgccaggaagggaagaaggaagcagaaaatgaactgtgatcaacccattgcaatgataattggtgctgttctgggaatgcttcttttgtttgtgggtattcctttaacagcgtatattttaagggtgattggataatggacataggatcaggtagtcagtatccatcatgcgcattgagcaacttcgccccgcatccttttacgtttgacggggtagaatgtgcatcaatggagggctttttacaaagtctgaaattcagtaatccagatatgcaagcgcatgtgtgtacgctggttggtaaagccgccaagttcaaaggcaaaaagaaaaaatggtggactaaccagaccttatactggaaaggtatccctattcatcgttcctctgaggcgtatcaaatcctgattgaaaacgcatataatgcattattccttaatgaagggtttcgccgtgcgttggcagcaaccggaaaaagtaccttgacacattcaatggggaaatctcgtatgaacgaaactattctgacagaacgagaatttattagaaatttgaacaggttgagaaatttgttatgaaaagcgctgataacataaaaaaagaaattgaaggaatcaagaaattattgcattatatcgatgttgatatagagactggaatatgtacttggaaaagacccagaaaatctataaatgttggtgatgttgctggatgtaagaaagaaaaatatcatgttatttgtttcgattataggttgtatagacgacacaggattgtgttctattttgctaaaggttacttacctcaagtagtagaccacattcatggtgttgaacatggcgacggtattgataatttacaagaggcatcgcaaagacaaaacgttattaaaaagaaaggacagaaaaacaacaaaagtggttatcgaggggtgtgttggtcgtctcgtgctgaaaagtatcgagcaactataggtattgatggaaaacaaatacatttaggatatttcgatactccagaagaagcaagtaaagcatatcatcaaaaagcgaaagaaacttttggtgatttttataatccattggttaaatgagatctgttatgagtgaaaaagaaagagtagaatgcgtgttcctgttcaaaggcgcgattaatccattagcgttactgtatgcgcaacatgcattacgttcaacgttgattcagagtgttatctataaagcaggtgtgtattatgttaccatcggcgcaaataacatggttgttattgaatcctacgttaaggaatgtgcatcaaacggcgttgtctttgataaagtcgattttgatgctggggtagatgctgtttatatgtataagggttgatatgagttacgtagtttattttgattgttcggatctcgatccgttcgtgcttcaacaggcaaagaaatatcatcaggatgtcgttggcattggtgtaacaaatgatgatatgttgtgcatcgaatttgaatattatcggacatttgagcgtgattatttcctgggtgaattgaacgcattcaaaagtacccttttctttgatcgttatgaggttatatcttgacagaacttgatgaactcattgacagtttacgaatagatttcgaagctggtaagtgtttctgggctaagaagataaccaaaaagactattgttggagaagaagcgggttccgtccgtcccgatggttattgtagaatccggttcaaaggaaaatattactaccgtcatcgagtcatcttttatgcacggaataggtttcttcctgacgttgttgaccacataaaagaggttgacaatggcgacggtgtaggtaatattcaggcagcaactcatcaacagaatatgatgaaacaaaatatcaattcgttgaataaatctggttgccctggtgtatcatgggatacacaaagaaacaaatggctttccactattaaaaaggatggaaagaatatctatataggtcggtttgcgtcttatgatgacgcggttactgcccgaattaacaaagaaaaagaactatttggaaacttttataatgagcacaaacgcaaagcctgtaattctgactgatattgacgggatcgccgtaaaatggcagtcggggttgccgttctttttgtctaagcacaacatgcctactgatattgcattagaaatggttacagatgaaaaatttcgtgatatgaccgaaatcttcggatgtgatcagcagttggctaaaatccttatggaagaatacaataacagttctttcattcgttatctgaatgcgtatgatgatgcattgattgtgatcaaccgtctgaaaacgcagtatgatttcgttgccgttaccgctctgggaacaacaccaacggcaagccttaaccgaattgctaacctgaatactcttttcccgtctgcgtttaaagaggtgatggtcgtgggccacggtgaaacaaaaactcatcgttacctggaagcaaaagcaaagtatggtaatcgtctggtttgctttgtcgatgatctcgcgataaacttaaacgaatgtcataacgtcattagtcaattgccgttattccatatgttacgtggtgaacgtgaagaaacaaatgcacctcaccagttagtaaaatcgtggtttgaaattgaagagaaactaaatgatcttgtcaatccttaatgaacttgcttctactctgaaaactaaagagaaagaagcaattttaaaacgtaatgcagataatgaattgttgaaagaagttttccgcattacgtatacaaaacagattatgttttatgtgcgtcaatttcctctggtagaagggaaaccaggcacaacaccgctttccgatgcaatcaaagcattactggaagatttagcaagccggaaatatacaggcaatgcagcgcgtgatcgtttactggatattgtatcatcagtgaacattaacgatcgtgaagtgctacgccgtatcattaaccgcgatctggaatgtggtgctggcacaaccttaccaaacagggtatggaagaaactcattcctgaacagcctcaatgcctcgctacgccgtttagtgaaaaggctttacgtcgcatcattttccctgcttactcgcagcttaaagccgatggtgcgcgttgtatggctgatttgctggaagcattaaaccgtaaggtatcgagagcgggtaacgagtacgaagggttaactcagcttgatatcgatctgaaaaagattcgcgattatctgggatatgatgtagttctggatggagaattgatttatgttccttccggaaccgtaccaacattacctgaacctgaaacagacatgcctttttctttatctgctttcatggacgatgatgataacgacattgcgttatttgcggaagaagttcgcaaagtatcgaccccagaagaagaacaggccgaagcaaaacgcgaagaagggaacgggatcgtaaacaaatctctgaaagggacgatcaccgaagaagaacagcgaaacattgtttatgttgtttgggatattattccatatgaggtgtattacggcgaagctgaaagtgttcagacttatgatgagcggtttagcctgttgcgtgatatcctcctggatctttctcttccttctgttcgtttgattcagtctaagctggttaataacattgcagaagcgaagcaggactataacaattaccgcaatgacggtaaagaaggttctattctcaaaaacagaaacttcaaatggaaagattcgcgagtagccgatcaggttaagctgaaaaacaaaaccccgattgaactacggatcattgatatctacgcgcacactaaagaagaccataaggtcggcgggtttgtggtggaagatttatccggaatggctcgaacgaataccggatctgggttaactgataccgattatcgttacgatgatgatggtattacccgtgtatacattccattagatgaacgtggtgaactggatcgcgaatacatcatggcgcataaagatgaatacattggggccattgtagaaatggaagttgacggcctccagaagtcgaaaacgcgtaagaaaggggaaccggaatacagtttcttccttcctattatcaagaagataagacgcgataagaccgaaccagacgatattcatgttgtctttgcagatctattttaataaaaagcccttgactccggtcgggggctttgttatattgcatatcgaaacgtaaatcactgagagaatatattatgactagtagttatcagaaacacaaaacccttatggcaaacctgtccggtaaacatatcgacgaagtaaaatctctgctgacagtaaccgaaggttcccgcttcgaaaccaatcacattatcaaaccttctgtgaagaaagtactgaaagtgatttaccgacatccggtgtatcagtgcgttcatatcatgaacagtaacgcatttattttcgtatataacgaatccgatgataagtgtgttggtattttccgaaaacctaactttgaatgcatgagcgaagcggctgttgcaaccccgatcgttgaagaatatccggattatgttcaacgcaacatgcgttatgtgcaatcccgacttgattatgcatacgatttcaattctgacgcggtagaagcgctggcggatatcctttgcaaaaaccagaaagatcgtcaaatgacaaaatatctgactgatccaacaccgccaacaattcgaatttctgttgaagttccgtttgaaaatcatttcatggcagttgaagcgcttgctaaacttggtttagaagtgaaaacagaagccgtttaatagcactttttgttaaagaagcctcttgcaatgcagggggcttttttgtatagtgtgttcattgaaacgaaacacggagataaacaaaatggctcacatgatgaagaaagcagaattccttaacctggttaaagattgcggattcgctcacttgaaaacttttcgtggtagtgtttacctctatgaccgcgaaatccaggttgccgaagtctattgcgcttctaacatgcaagaatctggcattatctctgcaatgaaccaatcaatcaaataccgtaaatggatgggctgattatgaaagttaacgtttcttatgaatctcgcgttaatggcgcacagtggcggaagctggataacggacaagtggaaaggcgcttacctagttccgatgagtggacacttgcggcagtgttggaaaccgaaatcgatctggcaacaaaagacggtattttgtttgaggtgaagaaatgatcacactcagtgattatcttctgtttactgctctttgggcggcttcgatattcataactgctttgatttacaataaacgtgatgattttgggttgtgggtattcattcacgggtttcctctgtctatgtggatcgtgatgactgctgaaattctccattaatagcactttttgctaaaactatcttgttcttgtttggtatattgtgttcatcgaaacgaaacagacaaaaggaacatcacatgaacttcatcgatatcaacaaagatttagaaggtaaaaacatcaaactcgttaaccgtgaaatgttagagagtcttggtaatggcggcgaaaaattcagtgaagaattctataacaatttatcgttgatgactgttaaacgcgttgatgttcagggtggttctggttgggtttctgcaattccggtttccctggtagatcaagcaacatatgacccagttgccgattcatgggatctagaaatgccgttggtattcgaagaagtcatgaagtgctacgaaatcgcataagggtattattatgaatagcggaaaattacaaatgaaagttagcgaagaagaagttaaagagcggttatcggtagcaagaagattccttgaatctatcgaccctgataaacttggaaaatgccctgatacgatttgccttaattgtgggcgttctgttcttgttggtaagtgttgcgataatccaaatatagttgtgatggaaaaggaacaagtatcccccgaaacatgggatcagatccaggaaatcattaaaaaccctccagcgccaactaagaaattacgtgaattgatgacaaggaaaatgaaatatgagcaaatttaaattgagtgcaaccgttcgccttattcgttggaatggtgaagagatccgttatgatgaccctgaattcgcccatgaaattctttcgcatcgtttgggattgaaaaacgcgtcattggttcaaactgttaaaacatcagcagagccggaaatttggcgttgtgttattctggatctcgataacaacattgattatgatgatcctaagaactatccgcttctggaagcacaagttgagaatgctccagaagacagacagtgttttttggttgagttgccacgcgaacattacgaaaacatcataaaggcccgtaaaaaggtcaataacaatgttttcgatctccacctcggattgtttgaggattaagtactgctagttgtgttcgtcgtagcggcgctggtaggttcccccacctgtatacattcaagtgtttgcaggtggaaatcttttgatacgtctcgaacacattcaacgatcagatattttcctgcatactcttccccaaatacctcaatgattgcccctaccttaacatctaaacgaccctgctttatatcgaatcggatccggcgttcatagctggataacaattgcattttagacgcctggaaaggtttaccttctgaatctgggttctgaaagttggtatcatagattgcattacggtttgtgaagatccatgtattttctgtgtctgtatcagccagtatgtcaccgtacatctttttatcagtcaatgacagactaaagaaactggcatctttaaacagcgttgtgttatccttatgggtaatatactgggcttctgtgaatatgacagtatcaccaacaaacacgttatcaacgttaaatttgtatgctgggatcggtgtctgggccagaatgtcagttgaacttttaaggaaaataccggaaccatcttcccacagataacagaagtcagaagaaactacactttgcccgttgtccctgatataatcaaatatatcctgatatgtaccatttagacatccaggagggatacgtatgttaccgccgtcaacttcgggggtaagtagtttcattttgctatacagtgccgtcatacactctgtaatcgtctgtacggcgttgttactaaatgaacgggcaaacttacgtctgaacgttttatgcagcggagagaggttcatacgcagcacagagcggtttttatcgtcagtatctacgttagagtaaagcaatccgtaataatgttgttcctgtgtaccgttatactggaaagatacctgtatgatcggctggataagttgctgatagattaactgtgcgtcgtatatctgcatcagcgtttccgatgagccgttaatcatcgtcttttcactaaacgagacaagagcgggtagcaattcagtatatgcgttatcaatatatttttcgtatgatgtatataatttaatcgatgttattcgattgacgattttttcagccataaaaatccctcctaatatatcctatttactaaatagtaaataatgacccaggttcaatttgaggcaataatgaaaaataaaactcttgataaatttataactacacggcttgaaatcaagaagactaacgttaaaaccgttcatcttccggatggaacagccattgagatccctaagatgtcgtatcgtcattttgtaaagattaagactctgaaagatgacccagttgcgatcatgcgattcatcattgatgacatcaaaccgcgtgaactaacagcagcggaaattgaatttgtgttgatccatatgtatgcacacaataacgctgattatgccaatacgcttaaagaaattgggctaaatcttgatgacctcaaaatctccgaaccttgctatgattttacgtttgacaatgtgcggttagtctttgacaaacccagcctgttaaatgctcaccttccgttcctcatcaaagaggcatatgttgacggtaagccagtagaattaactgaggataaacgagacgaattaattaattgcctgtaccgattcgaatatgatcaggtatcgcgtggtgtcctccaggaagtatacattattcatgaggggaaaaccatcaaagggcttaacatcattggtgaatgataatggctaactcttatttcaacgaagaacaaaagaaaaagtttctgaacagaaacagcaacaaacaaccagcggtcaccaaagtaacagcctcccttgatgctgaaagcgcccgtgacctaaaggaaatcaacgataacacccttgaaagtgcaatcaatactcttgatatcaaagaagggttgaaatcgttcgaagaaaaattccgtgacaaattcgcggggttcaaagaacaatacgaagaggataaaaaggaatcattagccgaacaactacctgatttcgtcggcccgatccgtcctatatccttaaccgatgataactcaaaaactgttgacaatacagtaaacgttaaccaaaatggtcagttcggtaagctggaagaaaacaccgaatctatttttcatgctattaacaaacttgttgatttatatgaaaatactgataagcataagccgcttcctgaaccagtggaagaacctgatccgtatgtagacactaagaaaaaacgcatcaatgatgatgatgacaaaagaagcaaaactctggatagtattgctaaaagtctggtttctattaaaggttttacatcgcagatccttagccgtttcattggttactctctggaagcaatggcaaagtttgctaaatggacgctccttattggttcgttaatctttacattcgatgtgttgcgcgtcacaatacgcaaatggttcgaagatatcctgaaagaaggggaatcctcaaagaaactatttggtacatatctgggtaacgtaaaggctatcgtaacaaagatcgaagaaggtttgaacaacttcaatatgaacaacttaggcgaatcacttcgtgatttgttcgttgagcctatgaagttgttggggcaaactgtacaaacggcaatcactgagggtatcggtcgtcttattcaatcattgggtgaatcaactggcatagacagcattaccaatgccggacgcggaatgcagatcaccgctttacgtgataaacagaaatttggtcttgaattgactaaagaagatattcttatgatcaagaaacaggaactagaagaccaaaaagcggcattagaaaaagaagataaagctattgcagcacgtcatgcattaacaataactccttctcaaattcctaatggttctatctataaagttgctcctactgattatcaagaaagaaatcagaaaaccgtagatgctgataaagaacggcttgataatatgaagaaagcaacggaagaaatgcagaaacaatacgatttagctaaaagcagcgaagaggaagcacaaaaattagccgatgaggaaaacaaacgcaaccgcgcacgtatagaagaagcaaaaaggttagaacaagcgaggaaggaaggaaaacagccgccagaaggtgaagagaaaaagggtgatgatctgttgggtaaagcaaccaactatgctaactctgaaaatctggatgcagccgatatcaaatacattaacgatgaactgttggatcagcttgaaaaacgtcgtaatgaaggtaatctggacgatgtacagaaggatagaatctctgaccttatcgagcaattgcaaaacaagattgcagcccgtacagaatccagcaccccgatcgacgcacagccaccgttagcagcaaataaaccggatgctgataaagcaagcaacattcaggttaacaacaaaactgttaacaacaacgtaactcattcagtacaacgcacagagcataaaccgctcgtagcgctggcataaggaacatataatgaagttttctattattgatgacagtataaacactctcaaaaatattaaaaatcgcggtatcccctctgggggtgccgcaatcacagaatcagtattaaagcaaactatcgttaccgccgaatttccggcccaacgtgcagcaggtatcgataatgcttataatgcttcgagtctgtataataacggccttctgttcactgcatatgattttaatggtgttggtagtaaagacaactatcgttcattacgtcaggcagcacagaacccaaaacaaatactatcatctgcgacgggtaatgttaagtacaaacaagtgttgaacagttctattggtactatggaacctgtttgccagatcctgctaccgcgaagcctgaacgataacgaagtaaacagccaccgctatcaagatgcaaacgatagtttcttaaccaaagggttgagtcgtgttgtttcaaacatggtatggggcgctgtagaatccatttcaggcggtattatggcagaccgaagagaagcccttgatgttggtactaaagccgctttccagggttctgacaagcgaacaaagatgtattacaatacattcgtgatcgaaagccgtaatgatttgctggaactgattaaaatctactatctgtttactgttctgggatatggtacaacttctggcggtactgctaaagaggttgctgcattggttaaacagtattacggtgttctgggtgctaaaaccgctaacgcaattagcccttccagtaacccagtaacagcgtcagattttgataatagtctgggtaatgacgtggttgatttcatttcaaacgtagaggttattaaatcgcctcctgtctggtttattcgtgatttccagtctggggattccttgcgtttacctcattcaacctttgggccagcaggtattaccagtgttcgctttggtcgttctattgataatattgtaaatacattaagagaatcaccaaataccccgatctcacttgaggtcgaaattcaatttatggaactgatcgatatgcgtcaggattctatttttgatacaaattactaaggagatatgatgttttacaacgtagatgaatttttatcaggtatggctaatcgcgattttcagcgtagcaacctgtttagcgttgtatttgcaaccagccctgcatcacgtatccttgacaacacgatcggtagtattcgagatactttgattgatggatctattagttctatcaacgcaaacaacccgaacgaattcattaatgctatcactggcggtgtgagtaaattgtttagttacaccgtcgataaggcgattatgtcgctgaacaaaacaggatttagcaaaatcatcggggcaattagcccccgtttgattacttccctgtttggtgatagcatgtatggacaactgctatctgaattccgtgatgaaatgatgtataatatgggtttaagcattatgggagttaacctccctggtaaatccattgggtacgaatacgtttataatggtggcgtacctcaaatcagattcactcgccctgagaatggggaattgtcattgacgttccgcaccgattcagaagcccgtaacctgaaaatctttaacgaatggatttccgctattcgcgatgatgtaacaggacaatacgccttcattgatgaagtgacaagtactattcaggttaacttacacgatcgtgatggttcaccgcatacaacatacgtatttcagaagtgcttgcccgtcaaaatcagtaacagtgaattgagctatgagaacaacaacgaaatctggacatttactgttgattttgcctataaaacatcatgggttgttgaggctgataaagaaggctgggaagggttcaaacaatccgtagaggaaggtttagccattgcagcacgtaccgcaattacaggacaataaaggggctacggccccttttgaggatcttatgtttgatattattcgagtaacattaccatcagggatcaaacgattccctatgtttacagttaaagatcagtttaaattaatgctgacccgtattgatatggaaggtcggccccttaaagagcaacaggaaatactggatgaagtgctggatctgctttatcctgggtattccaaaacagaacaggaatacattttcagccgggtgtattgtggttcgttcggtaaaaacgttatcaaggttgtgataggcggtaaaggtgggggccactccgaagccttcatggtgattaatgatattcaactggaaaacgaatacaagctgaatgatgaaatcacattagggtttaacttcccccgtacacgcaatacaagcgaagagttgtttcttgaatgtatcagttatgtaatatacaacgaacagcgctatgaatggacatcactaaccgaagaaacgaaagagaatattcttgatatagtcgaacttgatgatgtcgaaaaaatagttactatgctaacgaaatcggttgatgtgtctatgcgcggtaaatcatttagtggtatgttaaccctgttcaagatcctgtttagtcgcggggatctggatgaatttgtgaagaccaactatctgctaaataaaaacggcctgaacctggaacctatcatgaatagtagcccgatggaaaggcaaatttatactgcattgcttgcagaagacttgaaaaaacaaggtgctgttaaatgagaaagcatgaatataaacacgttgagaaatataatgttgattatcgtcctctgacgcatacagagtttacccccaatgcagattttatcaaaggggatgtttacctgtatcaaagagaatatcttttcattctggcacttctggaaagtaaaaatattgatacccgtcaactgttcatcaactgtgaagaatgtcaggaaagaatagaattccagcttaaacgcaatcaaatcatggttgaagatttcgacgataagctatacggcaatgacggaatcgcgctatctgttcaccctcgtaagactggtgatgaagagatccccgatcttatcgattacgtaatgatagacggcgaacagatcatgtggagtgattgtagcgacaaagataaagaaatggtgttggatgcaatcgactatgcaacctataaatcgatttctaccgccctggataagccagcagtggtcgcaaacattccggtaaggtgttcgtgtggacatagccatatcgtctctctgagaggcttacagcaatttttaaaggtggtctaaatgggtgtaaatctgaggttgctatatagcgatatagaacctaacatgcaacgagattggaataatgacgtagcggcctcaaaaggggccgcagcagtgagaaatagtttgattggtatcgtaaccacgatcaagggtacacgtccatttgatagtaactttggttgtgctattagtgatatgctgtttgagaacatgaaccctctgacagcggaatcaattagaacttctatcgtatctgcgatccggacatatgagcctagagtatataatctttctgttgaagttattccacagtatgatgataactcagtaacagtaaccatctattacagcatcattgatgacccggatgacgtagagcaaatcaaactacagctttccgcatcataacaaaaagccccttcctttcggttggggctttctcttagaattcaatgaatcccattagtgtttgatatcgcaattcaaacggggagatataactttgcatctggttttgatcggatacgatgtaataatacacctcatcattatcatcgtatagtgcttctttgatgatgcaatatcgatcggtttccacgttcacataaagagtatccatgtactttgtaactttggaaccctgtgaactgatctcgtgaatagcgttatctatgaacagtgacaatgcttgcatgaagttatcaaactcaccatattcacagcccataatagaaattgcagtgtattggtgccagcctttgattgtatctccacggcggatccatccgatttgtctacccccgatagatacacaccacactttaccaatatggctatagaaccgcacaacttcttttaataacagggacatgaccccgcattttgtataaggattcattttaacctcatttcatatcaagtagccatgaagggttagtttcaagagaaatcgcagtatattcgtattttacagtataacctttgaaaccgaaaggaataattacattttcattgagatattttactttatgctttgcttcttcttcattcagagcagcacagactgttgtttgttcaacgttaccagcaggagaagtaaatttttcaatgataatgtatacgcagttcatcctattgccctctttccattttttcaagtttcagtgtatccacttgcagttgaagtttaagaatacaacctttcgatatgttatacaagtagtcactaacgatttttgactttacctgatcgtaatcagaagataacgtaatccaatcatacatcgtttggtatgatggaagatacgtacattgttcttcttttgataacgctttaaatgattggtaatcggttggaggttccgaagcaattgcggttgtggtcataagactaagtgcaagtagtagatatttcataatgtattcctcattgttttcgatagaaccaatatagcaaaaagccccgaccgaagtcaagggctttttcatcaatgcaagaaagatttcacgtactgttcgatcttttcacgacatgtatcaactgaggtgctttccgcaattacggcatgacataacgcctcgcctccgacccagaaactcatcatgtactgaatatcacgaccttccatttctttttgatgcgctttgattcgatcgaaagcgttttcgattgtttcagtagcagtaagcatttcggattccccgtcaacctccgccagttccccatcgatcatttcgctttcgacttcttcccagtatactatcgttatcatgcattaccccagtggttaaccgtcgtaatccccgccacaattcacatcgccttcaatgaacagttcgcggttatcacgtaataaattatactttctttcgagttcaggcccgaacgcgtcggcgtcgtcataccagtcatagttatagcatccggtttcatcgtcgtattctggttcatcaccgcgttcattgaagtgaacaattttgatatcgtccatccccagttctttcaacttatcccagatatacgaaatctcaacgctatgggaaccgaacgcttccagtgagatcgtaccgttgctatcgacttgaggaataccccacttcgaacgagtatcatcggtgatcatatctattaatgactcaatattattctcaccgtagatatcagcaacttccttttctttaccagggcgaacaagtccgatcccgataataaagctactgcttgagctattgctcacaaacccagaacgaattttcatcgcatcaccatattaccaatcatgaatagagggattagcgcaaagacgataccccatagaatgaccttatcttcacgacggtcacacccataatagataacacctccagcgaaaatcaatacaacaactgaaacgaacgcgaataaataaatcatttgcaggtatccattctcatagaaacttctttcaggatcttattcagatcgtgaagcgcatcttttacgttaccttcgttataggtaagcatatcctggtacagccctttcaagcaacgattgattacatatgctttttcagaaggtaacattgtaccagagcgattataatctctgaaaatgtccatcatcgtgccgttgttaccaggtaatgacgggttgaagttaaccataccggacatcaaactatcaacatacacaactgttgtgttatcagaacgatacgcgccaccaactttaaaccagttgctgaacacataaggagattcccgcacttcgctcaaatcggttccgatttcatcgatgtttacacgaatgttgttaaaatacaccgattcatcaatagaaccatgacgccataagatagcaccattgttatttttgaatccgactacatcaacctgccagccgttatctgttaaccggacatcatcaacgacgatgaaatcaggtagctgtgaatgaaagccgatgttttcaggacgggaattacgaaacccatcacgattggagaaataaaggatgtcgccttgattcagttcgcatatattcataagatttttaaagtccaattcaagtaattccacaagtcacctcaaagccccctttcgggggcaaattcattagagtttgacttctttttcttccagaacgattgtgcaatcaaatttcacatctttccagaattccgctgcaacgatatctgttgcggtaacgcttacgctggtttcttcgaaatccagatccgcaaaccatgcgtgtccgacgacaataccgtacattacacgactcaggcgattattaagggcgcgaacctctttaatagtttcctttgtctgcttatcaagatactcgatcaggtcattcttgtcaagcgcttcgatctctttagatacagtatcataagcccacagaatgatcaggtcgccattgttgagtttcttcttaccttcggcgcgttttgcaacggtagcagcaacagccggaagtgatgaaacgcctttgattttcacgttcagttctttcgacatgtaaacatcagtcgattctgtgcgctcaaccttcggagaaaagccgtaatcacggatcccttgctcagacaaccattcaccagccgcctcaccaaagcgctgtttaagcccttctgcgttgcgtaaaccaatcgcgttatcacggaagaacttcattaccttctgacggcctttcaggatttccagacggacgttatcagcaacaaattccttaccagaaataccgcgagtcatcgaacggttaaccagaggcagagaggtaaagtcaaccagtacagacatacggtcttcaccaattttagccagcggtttgatagtcagaccagaagcacgtaagtttttcagagtcgggatatcggtttccagcggaagtaccttaacgttaacgataccatctttaacaatggtaaagttacgcacttgtttggtttctactttttccggcaatccaaactctttttgtttgctttccggaatggttacataaccttgcagatccgtattgatggaaatgttcggacgggaactgttacccaccaggtgtttcactgcaactttcgttgtggtttgggtaaattccggtttccatacttcatgcgctaccagttgcgccgccagtgctttacgttcttccggagtagaagcgtttgcaatctgttctgacagtttatccagcgtatcatcatctttctggacagtctgacggcctgtacgattgtacgcccagtgttcagaagacaggtcgatcactgtgtcggtttctgccagcagttcgagagcatcaaccagagtaaacgcgttttcatcaggaaccatgttgtaatcaacaccatccatcagacgtttagccggatcaacaaccgcttcggagatcatatctttagcgttggaataatcctgtttggtaaagcagttatcgtatgctttaatcagacgcacatcacccagctttttcagaactttccatgccagatctggattcatggtatgaagcgcatgatacagaaccacatacagaacctgttcaccttctgctgttgccggatcgaagccgtcaacgtcattgatcgcgttttcacccagcgcccaaatgtttttgatatgttccggaaccagaacaacaccatttgcagcattcaggacatacacacggccttcatccaggtagatcgcatgagttgcatcgccaactttgacttcaacacgtgcggaggtttgcgcggtaatgatttcatcaaatgcaggtacatacgcatcaaacccttcaacgaatttgtgtaatgcgttggttgcttccgccattttttccagcagaggacggtttacataataaccatattccaggaaagcaatgttgttaaacgtcaacggcagagtagaacacgctttcaggatgtcatcagtacgccagcagttatcataaccatcagtcaggaagatcagactgttcagattgccattatccgcttgcagatcggtagcgacttcaaccgccagttgcagaggttcaacgaagccagtacatccggtcggacgcagataacgatcgatagcatcattgattttgctcaggtcggatacagagctaaccttttcgcccacgaatacagaaccgaactgaccacggctggagaaatacagaatagatacggtatcatcctgcttaaccagcgttgccaggttgtttttcaggtgctgacgaatgcgcgggagttcgttatacatcgatccggatacgtcacaaacaaaaacgtggttagtcggggttggtttggctacggcgtttttgaattcaatgttagtgatcataattttctcatttataggtaaattttattaaaatttcgtttacttttttgctaatagtatctaatgcatcatcgcatccaaacttactactcaacaatgaaacaaaatcatccatcgttgttgtttgagactcgccaacgtcaaaagacagagcgtaggcaacaggatttttaatccttacgatttgaatagtatactcattcagatcgaaccgttcaagatattttcgcaaagaaaataaatcaatcggtactggtagagtttgactaaacgttatttcttcccccagttgataggggggcatttttacacagatttcgtattccatcagtgatgactcttcatagtgtgttccagattacggaaaatttgcccgtgttcaagctgtgattggaattctccgcattcatcagagtaagtaaattcataaatgaatacaccgttctgattgccaaatttagcgttgtactcttcatacaaccacatcttgatcagagcgtctttctcttctttttccagatcataccagtcacgcccatcataagcaagcgcaatttgaggattagaccgatatcgagtttctgcgctatcttcggtttcccattcataacgcttatcatcataatatgattcaaagccattccccatatgaccgcccaggtcgcggtgtacttgctgtacaacttcttccgctgtcgggcaagtcatccagctataaccacagttaggaacacagtcacccatcatttcgcggagattgttgatatcagtcggatccttcgggaaccggacgatgaaactacttgatgaactattgctcacaaaaccagaacggatcttcattataatttctcccactcaaacgcagtgaaatgttttctttcgttataaccaacagtacaacgatgtgttggctttcctgtgaatccatcaaacacggttacacaatagtaatgcaacgacggaagcggtgtatgtttaatgtatttgatcgcgacgttcaggtcaacagtagaacatacacaatcagacgtttgctcaaaacggtcatcaaaaatcaactcaatactatagatgttcatctttcacttccttcatgtttttcataacctcttcaaaagttacggggatttcgttgtactgtagtgattcatcatcccatacatcgcgatgcccgaatgttgaactttttgcaatgattttttcattttcccatacatcaatagtaacatgatcaccaagataagggaaattaggaactttgttcagcgcatcaacgcagttttgcaatgattcagaaacatgggcaatttcagtgaattcataatcagcactataagaagctacgtaaatcatcaccaccccctaacgatgctaatcaacagtaaacccaggatccagaacacagcaaccgcacaaatacgggccattactacatttccgcgactagtccactccgcactaaggaacaagagaacaaacgttaacgcgtataaaaccatttcaataacttcggtaatcatataaacctcactgaacataacgattgtagttgatgtgccacatgagactagacacaacatcggaaacaatcaaaaggaacaaaccagcaatcattatcaaaaggataactaaccaagtggttccgatattttgttttaacgacaatagcaaacacataatactgacaaaagcaaggaaagaaataacaagcatcacgattgaaggggccataatataaacctcacgaaaaaaccccaaaaggggattgattaatcaatgtccgaacacaccacgaatagactctgcgaatgcatacagttcaggatttttagcttttactgtttcgatttgctccagaatgtaatctggcttgtatttcgcaccgaaccagcagtaagagaaagagcgatcccacatgaacacgttatagtattcaccgttacgaacttcaaccatcacataaccaggattagaacccagcggataatctttcagaagattgaatttcgcgccagcaccagtacatccgttaaacaggtcattaaaagtcatggtatgttccttttgtcagtttcgtttcaacaaggtcactatactattcttcgttagcctatgcaagcgcttttttgatttgttttgcaattgcttcgatcaccggaacagatacagagttaccagcttgtttgtacgcctgtgttttgctcttatgcatcttgaatgaatccggaaatccttgcaaccggaaacactcgcgaggtgataacattcgagggttcttaccttcctgcaataccagacattgaacaccatccttatagtattgggctgttatcgtcccagtacacacagaatccaccataacggcctgataaccaaaccccttgccgtttgccttgtttcgttctttacgctctctaaatcccttccaggcacgatctgatatggtgtattgatcattatccggttcgagaatgtcaccgacccttgttggggtacgtggaggaacaggaaaactaaagaacactggatcgcgaaagcagacaataaacacacgctctcttcgttgaggcaatccaaaatcttttgtattcattacctgataatggatatcgtatccttcgtcctgtaacagcctgtagatggttttaaacgtgtttcccttgtcatgggttaatagctggggaacattctcaaagaacagcacagagggctttttagcccgtataatgcggagtatttcaaagatgatagtaccgcgaggatctaacatgccctgttttaaacctgctttactgaacgcctgacaaggaaacccagctaacaggatatcatgatcaggcacatcattttcatcaatggcgaatatatcaccctgaatattttcatcgccccagttatcagcatatgtttgttgtgcatgtttatcgatttcagacgttaaaaggcattcgaccccgccgaatgccttatcgaaaccgagcctcacgccaccaacaccagcgcaaaggtcaattattttcatacgtcgaaatcaacctcatcgattttgtatgattcttcgccaatatcagcccatagctgaatattcacactttttgcatcacgataaagagattgaccacaaagcccacctgtataacaagtttctgtaatctcgttaacttccaggcgaaggctattgcgcataattttaacaacagccttttccattgccgaatctagggttttagtatcacccaatactacatctttaacgttcaaaataacatcactcattatcgccactccgtttcaattccgtgtttgtatgcgtcaacgcccagaggggtgatcactaaacacatatcagtatttttcgttggcgaactaaacgccatagatgcgtagcctttttgaatcagggcatcacgccctgatttactgggaacatcgttgaaatctaaatccaacatttttgacgagtatccgtaaagtttacacagaacatcaatttcagcgccggataatttcggatatgtcatttgtagtacctcacaacatgttcagaatacacacgttcaatgaaatcattccagaaatcgcgatcaacttctttcggataaccagatacagccgccagcttttcaacttcacacatcgttgattctagcgcctcttgtacggttgcgaaaggaacaccgccagctttaaccattttcaaaaatgcgctatccggaagaggatacacaatatcaccttctttgaaaatctggatcaattgcataccaccgcgcaatgcatgagaaagagctttccagtcgatcccgttgttggcttctgcttgccgtgcgcgttccccgtattcatcccagagtttatacacggatttcttcatttccgctacggtgattgtagactggaatttacgccccagaacttcataaaattcctgacaacctgatttcagtgttttgtctgtaacgaatcgacaaaactcgttggtcgggaatcggttagaaacctcaccaactttgatgcgcttgccgtagttagattcatctacgttacccagcaatgatgtaccataccagtaatcgggaatcatttgtaacacatcaacaacttcacgcagtgccgccaggcgagaacctttaacgccatacttcgccgcttgcttacgaacataaccaaacaggccagttagttccgtagtgtagaagcgtgaacggttagcgcggagatattgccagatatcagagttagcgatcagtttgctatcatctgcatgaagcatatcaatcgccacggtgtcaccatcacatgcgaggctaataaacttttgcagactgtaaatctgacgatctacgtcattaacatcgttctttgagtttttatcaccagttgatgtatcgatagacttcttcgcagtgcctaacaggatttcgcgaggatgagggagatagatccctttgtagtctttatcgcttgtcggtgtgttcagtccgtacaggtgagaaccaaataccatctcaacaattgttttcattatacaaatctccaataaaaccctttatgagtttttcttttaccgttacaacatgaacttacatgccctttgttataccccatttcaacggcttccgcaataccaccatttaaaatagtttctctttctgttttgatacatttcataatcaaaggttttatcaattctgttttcttttgtgaaatattagctaatgcaattgcatttctgatatcagattcactcattaaatcagaaatcttctttcttaaccatacatagccttgacttttggcaagtttgccggagcaacattcatgaatatgactagggttaaatccacgcaatttcatttcttgccgaccgcctaatatgataatctcgtctcctgtttcaaggttgaatccgacaactggaattatttgccgttccgacattttctttctcgcttctttcgtgaatattgtaagagattttaattttctcgcgtcgctcatttgcgaagatgtcgttttgtatttcttagtattatgagacatacggaaaaaagcatatctcattttatcaccagcatacttagcaagtagatgatgagcaagataatgctctttatatgttaaatatactaaattttcgggttcatcagtaccacctaatgacttagcaacgatatggtgtatatcataaccgcgctttctatactttttcgagtaacctttaggtatatctcttctttttgccaatgtaattagttggtcgtaaatacgcttatagttcatacgctctcctttaggcgtatttatcacttaaaatccgaatacggtttccataatcatttcctcacagtttcaaattcttcatcagatttccaatatacgttaaaattacgacaatcgtgttcggatgtcaacgtatatttttcatttgttttctcatcggtgataaccatagtttcattatcgattgagttaacaccgtaaacgaaaacattctcaccgcgtttgtttaaaaacgcatcacccttttcaatcaactgccaacaggtaacaggcaaaccacccggactaaccgggcgggtaacaagacaatagggatgtttaatcatttaaattcttccattgcataggaagtaagatctttgaaatacctt

SEQ ID NO: 27 - DNA, 176964 bp, Unknown
  bacteriophage strain capable of infecting bacteria of the genus Klebsiella
ctggtggtgatttcatatgtacccgtaatggttcattcgataacgtcgagattcgttctgaccgtagagccaaatcggatatcaaagttattgaaaatgctttggaaaaagtagaaaaactaaccggtaatacttatgagcttcacaacacatccggtggtactactcgttctgcgggtttaatcgcgcaggaagttcaagaagttcttccggaagcagttactcaggatattgaagcagacgggggtttattgcgtctgaattacaactcagtaattgcacttctcgttgaatctgttaaagagctttctgctgaggttaaagagcttaaatctcaactgaaataatgtaaggggcttcggccccttttaggagaaataactatggcagtaacagggccgtgggtcggaagttcggcaaaggctgaaactggcgaagcatggatggtgcaagctggggccaaattaagaatagggacaccgttttggatgtctaatatgattggacaaagcgtattccatttaattttcagaattaactatgcacaaggttcttctggcgatccatctagatatagaggattctttaaaagagggttatcagtaaatataggagactcagcaaaccagccaacattaaatgcatttcctggtggtgaagtagggtctttagtagccattacaaatattaaaggggatccttattgtttgtctattttaaatggggctgatcgacgagttaaagtgtctatatttaatgcatctggcggagaccagtatgatgtttatttcagtggaactactatgagtgacggttggagaagatatagatgcgaaaacgctggtggcctcaatgggtattttgaagctagaatggataatcagttcggtgctttattagaatatgtttgatagataaaccaacaaactcacctcatactattaaatatattaaaaggctacctatatggtagcctttttgttgcatcctaaatatacctatagtaacctaagaagagtcttataaaatggctgagagaaatcccgtagataaactagccttatttgatcgggtaatatcgtttgtgatgggtgtgaaaacatggaaacaattgctgataaaaataattctaataatggttatgtttcttatggtagtaacttggtacaaatggactgatatattcccgatgataaaaggtgcccttgtagtcgatacaagggctatcgaaatggaaagaacagaaaagtttaatcaatccgcgttggaacagttgagcatagttcatcttacttccaacgcggatttttcggcggtactggcattcagaccaaagaacataaactattttgttgacattgtagaatatcagggaaaattaccatcccaaatcgatcctaaaaacctcggtggttatccgatcgataaaacatccgaagaatacacgaatcatataaatggcttgtactattcatcaactacagcaagttcctacctaccgacacgtgattttgtgccagtagcttatacttttagttgcccttatttcaatcttgataactactattctggatcggttttgatggaatggtatgcaaagcggcctgatataccagatatgaagataaacatcatatgtggacaggccgcgcgcattttaggtcgagcgaggtgattaacgtaatgctggtgttaaattgtgtgatcttccaatagcccgtttgattgctttaaagaagttcatcaccgggctatttttctcgtaaatatcccaaactttcaatttgtcccacggatccggaacataatcttcattccttgccgaaacccccaatgtaacccgcctgtatccagcgctgtcgtgataatacacgaagaatggcctacctattggcgcaaccttacaacctctcttagcggctctcatagcctcatcgaacgtcatggattcccccaaaaatttctatgcatgaatggtcgaattccgatagtttcactcaaaatgaatatcggatgatctagctcatcgtggttttcttcgtcaatgacgatatcccaatcagtagccttttgttcttctaccgtggcaatgaatacctggtttacttcacacttgcggtgtgtacgtctgatgattgtatccccctcacgaaacacaatcatatcaggattggtagtgcggtacgcggttttacccgcgcacacttcattaagcatatcttcgtatgtcattataaaacctttacacgttgaacgatggtttgtttaacgtctttgtattctccgtgctctttaacggttgctttgaaagtgatttcatcaccttcgtttgcaatgttattaccgaagtaaacaacaacattaccatcaacattaattttggtcatgaatctttctacagaagtgtagtaagaaacttgagtatatcccagtgaaatcactttctcaacggttccggtcatttccagacgttgtttgatttcaccgatgtggttagctttagaaatgcgttcctggcgctcttgttcccactgttcgcggatttcttcgcgtttggcgatataatccttttccagtgcaacacccatgcagtaagcgcacacagcatcgaatacagggcggtttttgttgtcttctttagactggtcagcccaccaaagaacagtaaacattggcatttctgcaattacttcgcctttacgtttgccaatcggcatgatcccttgttccagtagttccagtttttcagtatcgaagactgacagtttaccgcgacgttcgaacagatcgaaatctgcaaagccctggaatatcattttgaaagtatcagtttcagttaaacgggctgaaacacggtcgaaatactcacgcgctttcgcttccgctttctccggatcggtagataagttgcagatatagttatcagaagtataaccgccgcctctacgctcaacacgcaaggtatacattgcatttttacgaccagaagaaatgaagtaagttgtagtaactacggttgcgttagtcatggtatttctccttaaaaggtatctcgtttcgatatggctaatatagcaaaagcccccgaccgaagtcaagggctttttaatcattcattcgaatctttcattgctttatgaagatgaatatcaaaaattttccagtacgcctttccgcgaggataaatttttgctttgtcaatatcgttgttgcttccccatgtattgtttgggccacgacagcgattttttatataatccgtatgccagaataagcgttgaaccgatgattccgtacctaatggatcttctttactgaacagaatttgtgtactcataagaagaacccagtgcgaacaatcagatcgattttcttttctggttcaaacggtgatttgctatcgatgttacactgatagaacataccaacatacttttcaggaatgttagattcaagcgcccatttcaggttgtcatcggtattcggccccaacataaggttaacaacatcaacagcataatcctgctctttggtgttaccggaaccgtttacataatgcccgtgggcggttttgaggatctcaattacttcgctatcgtcggtttcgactttgtaaagcgttgtattttcaggaatttcttcaagaatgatcaaagcggttttcatcacacttacctttgtgtttctgtttacgttttgcttctttaaatgctcgcttgcgatcgcggtgagtagaagcgcggttaatccatgcatgtttcgctaccaaattattcatataagccccttaaagaaaaatatttaggggctttcgcccctgtatcaatccagcagtttgcggatcttgtctgcgatacgtccggcacgggttgcgcttgcagtatgatcgctttcttttgaagccagttccgccagcttacgctgatgttcttcttctgctgcttggcgatctgctgcaacctgtgcaacctgctcattatcgtgagcaatacgcgcttccagttcagacagggttttgtcgaaagttgctacgatttcatctacagaacgaattttattaaacagtttcataatttatctcaattggttagttttaatcagtatacatcaatacggctggaattcaaaatcataaatgtcattcagtgcgcggttccactcggtgtagttttcaccagcaccataacgcatttgaatagcactttcgaacgttgatccgttgaggttcgggaaaccgaacaggtttttgattttgtcatgtgctacataatacagagaagcactttccagcatcgcaaccatcgcagacggttcgtgttcgcggcgcttgatacgtaacagagtacgactagcaccagttttacggcgttgatttggtgctacgtagaaacggaatactacgcgccctgttttatcatcaactaccaggtaaaacccgttttctttcagatccacgccttcgaatttcttgaaggttccgcgtttcatgtcaccaattttaattgcatatttgtgaatgtcaagtcttgtcagaattcttttcatattttttagataccagtttgcctaattttgtaatttcgcctgtttttacgttaacaaacaaggcgatgctcagaaatgggatgctaatcactacgctgatcaatgtaaacagaaaacgtatcacaaaaagaacagcacgttcaagatatcgttgcatccacgcgattcctaaacaactataccctactataaaggtggttgcaacataaaatgcaccaaatcctttacgaaatacgtaacctttcccggattctatccggtcgtcggcccacatttcacgggcagttttcagaatagattcaccactagcgcgagtttcgttagccgaaggcatgtttttaaatttcatgatagtctcctatgcgcccagaactctccaggcgcggttgtttagttagtaatggctaaaaccatatgtaacatcaatcatgactttataacggcatacacgcatttttgcgttattgtaatccactgggatcgctaccacgtcagcaggatccacctttacctgaatgactctaccaacaccgcccccgtagtgtggaaggtatgatttagccgcaacgtgtaggccagtagaacaggtgcgcgttttatcttcgtctaccatgtttcgaggcatggagacagtcacaccaggactattatcaaatttgccagtagcgagatctttatagttatcgcgcacacgtttccaggcaaggaaacaaccatcatcggtcagttcaatgtcattatgtacaaggaacccataaagctggtatacagcatcgcgtgaagggtttcgcatcaaccgttcaaagaagttcaccagatgttcatacggacgatcgttatacatttcgcgaatgattcgttgagtgatatcagaatcaaacactacatctttatatagaagctgatgaccaatgattttaatgttgcctttgctataggttcggatcgcttcttgagtatccaaacaagttacagcacctttgacatcaccagctttcagcatttcatgcgctttcttaaagttcggatgtgtttcacccgccatgaaaacgcgcccttcgtatacaaccgtaatgaacgattcagatccgatcatacgcggtacagtgtctgatactttaggcttttgttttacatcccttttcttagggaattccgctaacttgcggttgataacgcgcccaatggttcgggcgcttacgttgaactgttgggccagtgctgttttacttgcccccgtcaaccatccattatagatagctttctgttgtacttcgtcgagaattttgaccattatttccaccgtattaatttcttaaactcactgagattcttttcgttgttgtaaatcggacgaattgaataagaatcgctatgttcaacaagtgaagccagtaacgggtttagtgatttaaagatttcccatgcctgatcaacacgttttttcatattgctgcgtttaacgcgcattgatgctacggattcacgcagaatcggacaacgcaccctggaaagatttttaccatctttctcatacccttccagacacactatacgttcgagggtatcaacaatcttatacagtttttcattatatcggtttttcacaatccgatcaagcgatacaccgaaacggctatgcaatgcgtctgtttctgttgagtgatccttcccaatccatccaggcaagcagttatctttcaatgccttttcggatttaacatactgcttgcacagcatatcatcaaagcataccagatttgaatccgggatccacttccagaggctgttacgtatagcaaacacaacagggatcccagtatggcgcatgatacgcgataaagtagattctttcattgctgaatccatagacaacctgggattttcaccatctaagcggctatattcatcaataccatacaaccgaacacctggggctttatccagtgataaaaactctgattttgtcataaacagagaagtttttgccagattgccgttactatccaactcataacgatatacggtcggggtttttgggcgcggttctgaatttttcggtgcatatagcgcttttgatttttcgcgatctgcatcatagatctctttttcttttgtcatttcactggtacggagatacacaatttccgattcatcaaaatgacctttccgaacgatatcattaacaatctcacgctttgaatcactatcgtaatatgcaacaaagctaacacggcttaggttatgcattttagcatacccgacgatatacggtttaaccgtgttggtatccacttttaacagaataagtttcttctgtttccacggataataaatgcgtgtgatgtcctggcgtttggttgtttctggcttatacttgctccagcggcctccgctaccagttacctgataccatgcatctttaccgtcgtattcgttcgcccaatacccagcaatataatcatcattatatttgtttggtttgactagttcgctatggatccaaccaatagaatcaccattgatgcgaaaattagcatctttaccaacaaagttttgtaccattgaaggcagagaatggaaccacgtcagtttatcacgcacggtttgtaacttatcgaattctgatttaactcgattgaaatatacccggctgatttgtttcagacgttctttaacaatccctactgtcattttatccatactcaactcttcgcgagaaggcatgaaatcaagttcaccgatcgggaagtcaataatatacgtatactggctttctgtatagcaatagaacatcgaggtatcatacaaatctttatccagaggataaatgatgttacccatgcgagcatatacaccgctagtgtatgccgatttatgacggatcaccccactatcattggttgcttctttcggctgatagttgattttgagaatagaagcaccaacaaagttaggacgaatatcagtaaatgattcgtatacccttgctgcttcgttttcccattctttgatatcttcaaccttaaccggaacggtgatagtaaccccgttaggttcatcgctttcaatctcatacagaggatcgcagaacggttccccatcatccatatagattgtgtaaccgcatttgatgccgtcttttacagattccaccgtgaaagcatcggaatagcaaagcggagatttgcaacccagacccatagaaccgatcaggtcgtttgaatcatttttagttgattcgaagtaaacggtaaacgcatcactaacgaaatcaggagacataccgatcccgtaatcacgaataacaaaacgaggatcaacagcagttggcaactggacatcaaacgggttctgatttcccgcttctttgtgtccatcgatcgcattacaagacagttcgcgaatgattgcgcggatcttgtatttgtatactgtcgaagaaaggatcttatacgctttcttgtttgcgcgtagagatagtttgtttcgtcccttgctggtatctgtaccaacacggtagatggtttgcggtgtatcttcgcgtaatttcattgtttatttctcacttaacattaaaaataacttggtcacaagagtactttgacggctttttgttcagaccatattctactacttcacaataagtgtcaaggaattttaccaatttttcttcctcgacctgctgtttcttcatatcaaggatacccatcacaatagcaatgataatagaacagaagaatacgcagatcccaaatatggtcagatattttcccaacttaggcgcattataacgtgtcataccttacccctctttgcgaatgtacgcaagttcttcatgggttactggacggatatacagacggccttttgtatatgccttgcgcccactgatccaaatgtttttcatatccttaacaccgttcatcacatcgttgtaaaacttcttatcagctttagcctgatagacttcacggccttgataatctttcatgaacaaacaataaaggatctcattcttatcaactagattagtatcctttgtagttgttttgctcggtgaaggtttagcacccaggcgcaaggccatagcttgccacactttaccatgttcataacctcgcccgacaagagcatgagcgatttcgtgtaaaagagtgtctaaaatatcctcgtagatatcttccgcaacatgacgaccagatagttcgatcagttttttggtataactgcaacggcccagagtttttgtaatgcgtccattgatccggaatgtccaaccattactgatcaaaccgtgtttttccatcatggtacgcgcccagtgggttacttccattgcactacgagttttcaacattttagaatctcctttgcttggtacaaaaccaatatagcaaaaagccccctgcattgcaagaggctttgtaattatttcaacttcttagaaagttcttttaaatcattgagatactcaattttaggggttgtttcttcccagtatttcaactgtttgcgcaattcttcggcttcgtcttccagctttttgctttcgtccgtggttagatggtagatgttcatagccactaacatttcagcatgattctcgcaacctatccacgtagacacaaatttaaccgcttcgctgcgactaaggccacgcagagaatcaggagattctaccatttgagtaataaacgcaacctttgctagtgctttatctaacgcttccttagtctcctggatacgcttattgatgcgctgttgatatacattcatacgaatatcaacgaaatcctttagaagcgtttcagggcgttcgtatgagtatagtttaccctcaaagataacgttaatgtttgggtttgagttttcaatcaagccgaaatctttcaggatcttttcacgggttagcccattagcatactctcgcttgagcgttacttcataccgaaaatcttctttcgatagatccttgtagctaacgataacgcctttttcttccagcttgtcaaggattgcaatgtatttcacacggtcatatttcactgggatctcagtgataatcaatttggttttaccttgcaactcataggtgccgtaaatcgtaccgtctgtgatttcacctttaaagtaaggatatttcagatccagtgtgaaatctttatcattcaaatatgcaatacacccgttaacaactgatttaggatcatgaggcggaatgtttgttgcatatgcttttgcaatcccgctaaacccgttaaccagtaccatcgggatgatcgggagatagtacgctggcggtacgtgttccggatcttcatgaactggagttaaatcaccatccatataaattgctttgaatattggcgatagtttgcacttgatgtaacgaggtgcgccaggtttcttaaccagacgggaaccaaagaacccatcacgatcgaataacggaatgttattgcaccagtgcgccgccataagggataacgcttcttctacagaggtttccccgtggtgatatccatacatagcaacaccgccagcgatagaagctactttctgaaatcccgttccgccctgcatagcagagtgaataaagaagcggtgaacgggtttgaacccgtctaccaggtgcgggatcgcacgtgaataaatcgtgtaaagggcaaacgttagcccttccacctgtacaacatctttaatacttctttccattagtcaaccttagaaaatttgtgttttccattaacccaatctttacgcggatcggattcgtcaccgaagcatagttctaacacttctttgtattcgtcgtcaagtacgatgacatcatacttcaactgatcgcccagaacacggtcataatcttctttgcgtaaagaacccagccctttgatgtatcgtacatcttttgctttatcgcggaaaggtgcaaactcatcaagagaatagaaccatttttcctcgcgcccaactttagcgataacgatcggggttcgaatatatcggatccgtttttctgcaaacagagaaggccaacggctaaagaatgcaagcaacagggttaaaatgtcgccgccgtcaacgtcagcatcgaccatgataccgatattatcataagtcattccggaagtatcaccaggatgaatattgaggatagccattagctcaaacagttctttgtttttgataatgtctgtaaaactcataccccatgtattcagaggtttaccacgtagcgggaaagcgccttgtgtttcttcgttacggcattcgatgaactgaccaacagcggaatcaccttctgtcagaaacagtgttgtttctatccctggagtatcgataccggaagccggaacgtgtttagcaatctttgccttttttgctttctttttcgctttggtgatcgcggcggcttctgctgcttgtttacgaatcaatgcggattcaatgatcggagtaatgatttctggggtgtccataatcatttttgcgatctttttatagttcaaattcgcatgattgttaaactcacctgctgtatttgccaatcgctcttttgtttggctatcgaatgcaggtgcattaaagttatgcaggaataccacaagagttaagcattcttttacacgtgctttcgggatctcgatactatgctttttcttgatcatgggttcaagttcagaatagataccatcgatcatacattcaacatgaacaccgccgtttttcgtatccagaccgttaacaaaggatttctgtttaaacccgtcctcagtgctcgccagaatgaagctgagacgattatttgtctggacaatggttttatccccatacatggaagcgtacagcgggaagcgattagagagcgtttctccgttatatgtgaatttcacagacgggaaagcaacggcaagggccattaagcgatccttaatcacttctttggtttcttcatcgataccagttacaccaaacatagagaagtctggagtaaacttaacagtagtaccctgttctttactggggctggttcggtaatcgatgttctgtgcgccgtccgtacagttaatggttactttgcgtttcccgtttgcagtctcgccaataaaaatcgagctataacagtttgtcaggaaagaaccaacaccattcatacccatcgttacgcggtttttatcatcgaagttagaacccgattttgccatagtccatgctgcaactggtttaggaactattttcccgtctggggtttttacatcatcctggggaataccgcgcccgttatcagagattttaaccagattatgatcaatggttacatcaatcttattagcatgtttgaattcagttcggatcgcttcatcaatcgagttatcaaggatttcgttgatgattttaaccaacccttccacgtactcaaccttgcgatattggcccattatgaaacgttcatgcgcctctttgttaaccgatccgacgtacatatttggacgcaaccgaatatgatcgcgatcgctcatacaaaatgattcgtcaacctttgcgcccgttttggctggttgcggtttctgttctggttcatcatctgccagaagaaaatctaaactcatattcacctctttgtttaatcactgacattatatagggttctatgaaaaagaaaacccctttcggggtttacttgttataagggaaaccatcacgaaccatttgaggtttatcaactgttcgttttgcttcgcctccgcaatcacaatctttcggtgcatcacgggtagcaatgcttgccatttttggaaattctttattacacttagtgcatttataggtataggtaggcattaataaatctcttttaaactcaacatcttaactaaacgggctttgtctatgtcaaaaacacattgacgtgcgcccggatacaacttttcaacttcgtataccatgcaaacgaaaccaacattgtgcatgtactcgcgttcatatgcattgaaccaacgagaaaggcgctgtattgactgaaaaccaaagtataacccagccgcttgaaagtctacattatctttttcaaggttgcgcatcaatcgattatcgtcatccggcgctggatgtcggtgatcatccatatcaatatagatatcaggattcatacagaattgatcaagccattcagcggtatccattgacaaataacgattgacatatgggccactttttgtttgccatttttctgtacaatcattccagaaagaacaagaaaattccacacgatatacgaacatgatataatcctcacaagtaaactcaaggtttacaagtacgataccacttatctaatttttctgcaagcatttcgttgataatttttgcaatttcgtgccgtccgtgagtagtacccagttccaggtaaatcacatcaagtgcgcacacaatcgcatcaacactttcttcaacgatattaccgccgcgttgaggctgaatgaggcattcgctgatctcgccaacttccgctgataggtgatgaaccacatcactcttcgtgcgtttcttcactttatgagcgatttcgaaaaacttatcaagtacgatcgccgtttcttctcgcgttgcggtattctcggatgttgtttccatcgcatttcgcaaaacagtttccaaagatgtaaaatagttttcaaacacgttgaaagggatcacatgaggaacaccattcaaaaacaccccttctttacaaacataatggattttgcgcggaatagacaagccgccgctgcattccaaatgtcgtttaatgcttgctacaaaatcgaaatctttcccgtatccagccaacatactgtgataagtgagttgaccaatttcaggaacatagagatcattttctttatacagattcatttacaatacctttatggtagccaaaaatataacaatcaattgaaggacgttcaccagggaagtgaatgcattgcatgatgcgttcagccattagatcttctcccatgtataccgaagtagtttcttcgttgtaatgggtatcatacgacgttttaagtgtcatgcccggaagccctgcaatgtgcatgaatttagaattggtgcaaggctttcctacttcaccgttgatcatcaacactgcattagttttacgtgcttttctcatttgaatttcaccccgatttgcgatacgttccattcttttacgtcatcaacaatatcataatggttgatgtatggtaaagcaatttttaaattactcgcgtcttgaatgttgcgtaagaaacgagtaggagaaagaagacacaaccgctcggatccgttgtttcctttagcggcaaatgatagggtttctcccccgtcaatcttcatatcaacagaaatcgttttgaattctggtgcgtatgacgtgattttgccgttgtctctcggtgtactatagaaacatacactttgtgggacattataacggtctgtttcaatgtacatgtaatcgccgtcagtcattccccacacggtgtagagggatccggtatagtcaccaaaggaatttttaaaatcttccttcgtggtgtatcccagagagcgcaattgcataagctggttatgttgttcgattgcgtcggctttttgttgttcctgtacttgcgcatcaatcgtttcttgccaggaattatacgcatagtaacccacaacagcgattacagccataacccctacagctttccagattttagcgtcttcgtttttgttactcatgctatattccttttaagaaaaagggccgaagcccctttgttaacgaagataaaccacataaccgctttggtcaatcgcgcggtctgcgtcattgaagatattaccacgaattccttttgctggtgctttccagcttgcaggtttcaggatattaccatcattatcaatgaaggcggcaacagaacgctgattgaacatttcgccagtttctttgttgcgagtatcctgaacaacacgatgatatttgcggcctttctccagaacgaaaacggtttcgaaaggagaatcttggaaacgagcgttacgcgctttgtacattgcttccatgaaaggggctgctttttctgcgaggatttcgaaagtgttcatggtatatctcctaaagtgtgtttcgtttcgatgtaagtactatatcaaagatggttattctatgcaaggcttttttcgttatccatcaaatattttaagtgttcttttaatgcagggagttcgttcaaatggtgttgcttaactttctcgtactctttgcgttcccagttttcaagattgcttgccagcgcttcatcacaataagcgttcccgcgttctgcatcctgaactttctgtttccattgtgcaactgcttgttgataaagagaaccgttaaccatcataataatttcctcccttgtttcgatggggtaactataccaaagctaccccagaatgttttaacaaaaagtgctattagtaggtatccagtttatacattttgcaccagttcatgaattcttcgaaagtctgagtattaacacgtttttccttcttcactttcttagtgattacaggacggttagtaaaacgtttttgcattttcaccgtgattgctactttatcgcccaggtcttcaaccttttcaaccagcgcccactgagaaccaatttcagcgccgaaagtcaaaccaacaatctcacctgctttaacgtgtgctgcatattttactttaaccattttcgtattcctttctctgtttcgtttcgatgaatacaagataccaaaaagcctcccgcaatgcaagaggcttctttaacaaaaaatgctattttatttctttgagtaatttacggatcccgccgccctgtgtcttatcaaagattttctttgcatcaataacagaagtgattatgtggtagttgttaccttttccgtcaaactcaaactcgaccttgtagtcactacgaaatttcacaaaaacaaattcacctgcaaaatgcttacggaactgcttttcgttaatgtccaaccattcctgtgtatcatctaactgatacatgcgacaaaacaggatcgaacccattacagcaatcacgacaaggatagctaacgcgaattctgacatcatttacccctgtttactgattgacggtgtaacgatttaggcacaaccggatttcggtacggtttgactttgtggatcacgggttcttccccaaccaaattaggaaattggttattccattccatcgaaaacggataaggttgtgacttgaattcttcaatcacacagtttactaaacggtcaccaattacacccaaagccgccccaataatcgctatacgcataaatcaccccttaattgtgtcaagtacagtaaaccagtcatgaagccatatcgttgttcttacagcgatatacgttaataaactaatcaatgatatcgctccgcaaatagccagcgtaatcaacagccggatttcaaatttagtaaaattcatatcaatctcctttctgagaacccaatataacaaaagccctcaaccgaagtcaagggctttgttttaaattttcatcggttttggtaatcgaagaactataccaggatggatcagacgtgcatccggaatagcatcacggttgattttagcgatatcaggccaacgttcaccaacaccatacagtttctttgctatagaatacaggctatcacctggttgcacgacatagcgatccgattcaatcttaaccagatcctggttaatgatatcttcaaaggcttttgctttcgcttcgttaatcgtgttcccgtagtaatggcgatccataatagttaatgtgatcatcgtttctttcctatgctgttttcgtctgtctcttctaaggatggaggttcttccagccccagggcataacgtttagcatagattagcatcaacgcatctttagcgcaatcatgaattgaatcatgctgaatgaatccatctaacatgcctttacgcagtggacacgtggtcactccgcgagtcagtaaacggttttcaatagctgtacgcacatcacggctattccagaacacggtcggcatatcttcaaacgtgtcaagtttccctgtcatagttcgtacaacatcggttagcatagaacgatcgaattcagggccgcgcgtataatcgtatgactgccaacgactcacaccgtcagccgctaaatcagcaaagaattgtcgatgaccttcgtacaaatccatgtcgatatcggaagggaacaaaaccctttgcgcttctttagattgctgtttccaccattcgatcgttttttcatctttgatgcgttctggttgtttccggatgtcaaatttgtactttcttcctttagcaatcagttcctgaaaggtaggcggatcataaggatcatcaacaaacggaacatagctaagttcagctagttttccttttggaaacgggccaatactttcataatcaaatacgaaatctacgggtaaatgactcattcgcgaccccgcttatacgattccatgaaataggccaatgatagcgcgacttccggagtaacatcaacggattcgatcatgcctggagttactgccatcatcccgaactgacgaagcccacaacgagcaatcgatttttccagtcggatcatgttttctacagcctctgtaaaattgtccagatgttcccaatcgtggtaatcttccattgtagaacgatcacttttcaaaatcagatcggcaaccaattcagcataaaggcgcggaaggtgaatattcatttaaaatccctcaagcatgtttttgttttcacgaatgttacgacccattttcaaggtatcaatgatcactgcatactcttcaaaagtgaattcgatatcttgtgaaatgtttccccacgtataggtcggcccgttaggacagtataacccaacttctttgtttgcgttaacaacgcagcgcaattttgcaaacaacaaattgatatcgatagaattaaacccttcgagataatcaagcccctctctaccaatacggtcaacttctcgcaaaatcttttctacatctttgactttaacaataattttcataagaacctcaaagggccgaagcccttagacataatcaacagtgaatcgtgcgcgggtagttcctacataaagcaactgcttacacaattcataatcggcgtatgcgtatgcatcgcgcgtgtacatgtatgaatgatcatacgtgcttccctgacctttgtgatacgtacaaaccggaagtgccttaaccgtctggaacttgtttttgatttgccagaacgaataccagggggctttgtatccggtttcctgtttcatcttcttatactgaaacgcgacgtagttcaaataatcgcctaaacgttcctgcataaccggatccgcgataacctgaatatccgctttcgtatcctcgaacatcgattctgttttcatcaagaaataatcgatttgcaccggatcgcatcggtcagctttgatagtatcagaacgcggtatgatttcaaggattttaatttgctcgttgttgttatagataacttcaacaaacgaaaccccattcacacggccttctgtcactaacggttcttgcatcacaaccacttcaccaacaatgaacggctgatcagttttgtacaagtgtttacggatcactgcgtttaacttgtctacgtttgcgttagtgtaagcaaacatacggttattgttcaggtcatccggagtcttaacacggctaaaataacgtctcaggaagtcaccagcgttttcgtgcttcattacccctagttcaccattcatgaggggcattaacggcttaccgtcgcgtatagcgcgtgatacctggatgattgggtttccttctgcctgacgcataatcttatccatgcgaatgacatcaaaaatttcctcatcaaagaacggtgaaagctcggggatcccttcggtgttaacaggacggatctgatccttatcacccaatcccaggatcaccgcgcaactcggaatagtacgcttgatgatacggaataattctttgtcaaccatcgagacttcttcaaccacaaacacacgacattcagacaaatcagcggcttttttgcctttttgttgttcaaatactcgtaactcttcgttggttacggggctgattttcagtgctgagtgaatggtcgttgcatccatacccaccgcctcagagagaacgtttttagcctggtgcgtcggtgctgtcaaccagatcccactaatacccagttttttcaatgtttcaaacacaaattttaccagagtagttttaccaacacccggcccacctgtgatagtagtatggattttgtttctgatatttttaatcactcgatcatgtgcatttttctggtcttcgctcagatcgtcaaaagttaattcgctcatactttaatcaataccccttgaatacttgcgtgttcaataaaccaacgcatatctttctttttcttttcggttacggtttcaacttcttcctttcgaaagaatcggctaagaccactttgtttaactggattcatcttatcatgatattctttgataatcgaatttttatattcgttagcatcgtccggagatagaaacaacaaaggtgttaactctccttccttaatgaaggggattttaaacccgtctttatccttactaacgacgatataatattttgtaatcattctcgcccctcataacaaacgtagaatattccaacaaaccaaaacactgatagtataatcagtaaaagttttctttcaacgccatttacgtgaaacacacaccaaccaaaaagatatgtgatcatcgcgcaaacaccataagaaagaaccccaacagctactagcatcaaaaagtgccattgatcgatactataaatataataaaggagattatacatgatatcgaccgtaagcacaatagttgttcatgctcattatacaacaactcccgtatttgaaggagatatctacacgttcaaatacacttttcctatcgaacagatagttcaattaatgaaaaatagacatcctatcggatggattaccccagcaacaaaacatctactaaggaacaccatcgatggactaccgtaaaatttacaccaatcttatagaaaaagcaagagatagaacactaaattgttacacagaaaagcatcatatcatcccccgatgtatgggaggttgtgacgatcatgataatttagtagaacttaccgcagaagaacattatgtagcccatcaacttcttgtcaagatgtatccacacaataataagttgatatatgctgctaatatgatgtgcgtcaacgcaacacagagaaataataaagcatatggatggatccgcagaaagtggatatctcagatatcaaaagacaggacagggacaaaggcaacagaagaacaacgcaaaaagatgtcagaatcccataggggagacaaaaactctatgtatgggttacgcggtgataatcatcctgcttatggtcaaaaaccctggagaaatcaaataacaatgaaaggaaagcatgaatggaggtatgctgggattttctatgactggtatattaacgatattaaagctggaatctataaaagacaaggacacaagagaatgctacaagaattgcaaattgcaacaatctcccgtgttcctagaacatcaatcgagttattcaaaaaggggtggaacccttacgaagataccgattgggttgagtgggctaataatcaatagctgttggcccaacgacgaagattttcggcttgtttaagagcgtacatcttataaattgtttctgcatccatacccaatgcaataaacttacatagtacaaagtggaattggtcgatcatttcaaacagaacttctaaacgatcctcttcactcagatccgcaaatttagtattgcgcaattcctggtgatttgctttccacggtttccaaacaccggatgcaggtttaacaccgcgagacattccacccagagcggtatacaattcgcgggtttcgtcggcgatcgcgtcgtcttgcagtttcagccaatcaaggatttctccgcaagtttccagattatccggacgcggaacccaatgcagagtatcagacaggctttgttgtgcatggttttgtaaatccagcatggattgtaaaggatcgccattacgggccagaaccttttgatattcggaatctacaaattccagatcttccgggttaaccaggtgcgcacatgaattaaatacaggagttttatcagtagtcatatcaatctcattttttcggtgatttgtcccacgacttaaatcgaagttttgccgtgagtccagaaacagtattatctttcaaatactgcataatttcaagtttagttgcgccgtccgtttttatcatttcgttgatatctttggaaggccacgggcatttatcccacattacaaccttttctccagcctcaatcaatttaaagaggcggtgagtagtatccggatgacgtgcttcattgtcaagaacccagacacgcatatttttatacggaacctcagaaagtgcaagctgtccaccagtgatagcgccagcattatcaacaaacaggctatctaatggcccctcaagaagataaaccgtttttagcggatctatcgtatcctgtccgtaaatcttggttgattcctcacaggctttgattgtgatatatttcgactttgccccgtcacgtaaagcacggccctggaaagattctattttacctttcttatcgaagatagggatcactaatctcggttctggttttgcgatcggataggtatccggattcaccgtattaaccagttgttgccattcgcgagtaaaccacaaccgatcccacttgtcacggggaatacaacgattctgcacatattttatgatcggatgttcatccggcaaggtatctaacctttcgcagaattgaagagtaggaataaatttcttctcttccttcggtggttctgtatgtgttggctttaacgaattgcgatccttaaacgattccatgagataatcacggtaatcgtctggataatattctttcaggaatacgctaaacggtacaccataaccacagttaaaacaaccacaattcatatgatcaccctttttagaagggtagatccaaaatcgttttttgtacttgtctttcattgagtcgccgcaaatagggcaacgcgcattgatgcttaatgcccccgatttacgaacgatttcgctttgaggcaatgatcccatgatccgggttgcaaattctatatcaagatacatttcttacctcagttgactatctttagatcctcgtcgattatacccggcgctgatcatttcgtcatgttctttttggcattcaatacaataacggcaacccttcacgatagccctacgtttttcgggtatcggatccccacaatcaaaacaatgcgttaatgattctccgtttctgatttgagaacgtgcaaaatctatcgcattgtctattgttgcctgaatggtatcttgaacaccgtcagcagggccaaatccaaccgccattgtaaatcctcctaatcaaatgatttcaatatcatagactaagaggatttttctgtcaagaacttacttgcttttctgttccgtcaagcattaacttccaaccacgaaatgcctgtttaaacgaataatttattgcaatatcaattttatcagaaccttttcgacgattctgataaacggtcgcgttgtcactcatatacatgatacaaattggaaaccatgtataatcgttagcagtagcccagatagtgatattcagcggaggaattatcatttctttttccttttccctgcacgggtaacgcctaatactttcggcccgatgttggttactgctccagtagtcacaccagaagcaatcttttctgtatcgccgccagaatcacccgcgaccatatcctctaacatgcgccccttatcataatattctttgaggcgtggaacgttcaacatgatttcttcatgctcttgttctgtcagattgtagcgattgcgtagggtatcatatgaactggttaagttcataaacccactcatatacggaacagcattcattctacgcttgatatggcgtactgaacgatgaaaaggagaatacgcttctaactcttcttttgttttggggttgcgaattacttcgccttgtccatcaaggatccccagcttgtaagcagtccattcagtccagggctttttgagtagccggatcatccggacgctatatgttaaatccatatttttaactaattgatcactcatgattattactctattgtgaaagtgaataaatcagatttggtttcaggttcaaactccatacaaacaacctcgcatagtggtttaacccctttccaatcctccaggtaatacccagtatctataccgcatccaggattcataacgaggccagtttcatcaagaaactttttgcatttacttgatgtggtgctgtcatcttgtcggaaacagtgtgttttcgaataccggaaatttgcagacatttgagggattatgaaagttccctgacgcgcgatctgtgatgcacgttcgattactttatactcaaattccgcccctgtatacttacccttaaaatcagatgttttgattttaccaaaaggcggattactgatcgccatatcaaacacctgattaaattcagttgttaaggcgtctccatgcacccaggaggcttctggtacgatacgcttacctaactcatagtatgtgtgatttaactcaacacagacgatttcacgcggcgtattgtacatcatgtaatgaaccatagcgaaagataacccaccgataccagcacacaggtcaataacacttccacctgtgcaagcatcgattgtgaaatcgcgagcaagtccaataggggtaaagaacgcccctaattcagaattgtttgtaaacgcgccttcatgaaagttttcaataatgaacaacttctcttcgtaagttagcgctttgtcagagtgaaccagatccattatctgattgtgtttcttggtttccgctttcgttaactttgccattttcccagctatacaataatgttgattcgttagggtagaattcccatccgtctacatatccggtttcccaatcagtagtttgttcaaaaccacagatccattcatatacaccaggaggcatttcgatagaatcaggaagcccgatatcttccgcgctgcgtccacattcaaagaatgcatcatgaatgaatggtcgagataataccgtaacataaccttcatcgtcaacagctacgatccagcgcgaactgtgaggactatcgaacttcggttcttcgtccatatccgcttttatttcagccttacaaaaatcaatattcatttcaaaccctctttaacaccctctttcatggctttccaggtagaacctgcttcaccattcagggcggcgaatacaaatagtaagatagcaaggacaagattcacgccagcaatcaccatgattttgctatacacgaaaatgtaaggcattgccaccacccaccaactaaaagaattaccagttacgatgttgagtgctgcaagtaagaaagtgataacgaatgcgattttcataatgtcctcctttgttatgattaaggtatcatcttttgcgaaagaatgcaatacctacagatacaaaaaagcccctttcggggcttaatttttttatgcgttattgatgagataccgaagaacgtttttcgcttgttcctcattacaaccaactttgaaaccaggttcgatagggaggaagttccagaggaaatcaacacttccttcaacgtcatctttgcctttttccagcatcgctaacagtaaccctttgtttttgatgctgtttacgattgcgtcaaaataaccatcgctgaaatcaacattcgggttcagcatttcgttgtaagggttgttgaatacgttcattttgaatctcctttgtttaactcagtatcttgtctacgtgagttatattaccacaatggagattcaggtcaatacctttttacgattttttgaaaagtttttcgtatttggcttttacccagcgatacatatcttcggccttgtcactggcaatcagtgagaacagcagatagatcgcaacacccaccaacacaacgcctactacaatgtagacgggtaatagaactgggaagagaacccagaaccatgacatatgcgagaagccaaatactttagccgctgcaaaaatcagtgtcagtccagttagcagtttgatagccggaatcggaatcgttatagtcttagtcatttcattaccttacattctttatggggctattcgccccagtcaattaaaattgaatgtcagattttgcaatctgtgccattttatcacgtctggtagattcagcctgtttaatcatcgggccttgtgtctgttctactgttctaggcatagtgttgccgtggtagtcagatttaaacccgtattcgctgttgtcggtatccatccagcgctgattaccctttcgaacttccaacttgaacttgttgaaagtgttcttatcgccataacgggatttgatttgcttgaacagttgcataccctgatcagctaactcttccgtctcgattacagccaacataaaatcagccgtagcaggtaaaccagcggattccgcaacatcacccatactcacatccgaactatcccatgcagaacgaccaacctgtgcgcctgtccacattacggtattagtttcaacagcaagaccgcgtagttcttcggcaattgctttaaccagaatataggtattctcagcacctttaacacgggttgaagtacagatccccaggtaatcgacaatgatcacatccggaacaaactgtttcttcaatttaagctctttcacaagcgctctaaagtggtttgcacctgcacccgatgtagggtactgcttgaccaccaaacgcccaaccttacccgctttaaggcgctccattttgttcttatagtctgcgtatgtaatattcccttcgtcgatgtcatccatagtcacatcaagaaggttagcatcgatacgcttagagcaaacatgctctgccatttccatagaaatgtaaagaacgtttttaccctgttgcagataatcagccgcaagagaacataagcccagtgatttaccaacgttaacaccagccatgatgatattcagtgtaccacgttccgcgccgcctttggtgattgcgttcaggatcgggataccaaacggaattttcatcgccttcgattggtaaagcatccaccgtttttcataatcttcgaaatagtcatgacctactgaactatcgaatgaaattgctaatgcttcctccatgatttcagggatagccccaacaccaggaagtttcttgttctgttctgccagtggtttttctgcgttcgcctggatttcgattgcacgagaaagagcacgatacattgctttatctttgcaatatgtttccgtttccttcattagccaatctaaatcttctggcgcatttttcagcgactgaatcgcctttttcgtgtcttcgtagactacatcacttagatttcgtttgtcaagcgcaacctctaaagcagtttttgacggaatgccgttgaattcctgtacatgtttatcaatgaggtcaaacaaaacttgtgcattgccttcgaaatattcctttttcagatggggccatgcttggacaaaatatgtcccgttataaatcaggttagaaaatattgtatcaacgatcattgtattgccttataccaggttgctgaacatcatgaaaaagttgtaaaccttttgtttgaatacatcccataatgtcagtttaggctttgggacaactgaacccttttcaagctctttgatctgtgcataaattgcatcatgcaccagcgggatcaacgcttctttgtcttcgtctggggtactgaattctactttcagaccatgatcccaaaacaccttatgaatataaaccagatgagcaacacctttttcatcgttaatcagaagttcctgaataacatctttcatcgcttcatcaatataattctttgctttgctctcgatatccatacattgcctcggttatggggccgaagccccatagtttttataaaatttcgttgtcttcttcgatatcatcaaatgattctgggatatcgtcatcatccagatcaggatctgggatgctatcagtgctgtataaatcttccagcgcggaaccatcactgatttcacgatctgggatcttatacttttcttcaatagctttcaagaatggttgatgagtaaacagaggacgccagaattcaacgctatttgtttctgactcacgccatttcttttcttcaacttcgagttcgccagtctcagtattcaggaaagcgcggttgcgccagcctttggttacggtctgtacaaagttcatttccattgccagatccaaaaggccagaatacatactaataccgccttcataggtaacatgcagcgggaattttgatttctctttcacgaatcgagatttttcgatattcatgatgaaatcataacccaccacctcagtaccttctttcacctgttgtttacccaggatgatcgcagtatcagcggaatacattaaaccagtaccaccggaaataactttcttgctgtacatttcttgtgtgtcataggtatgacagatacaaaccatcgggatatccaggtcagccagataaggcgtaaccatacggaacataccttttaatgcttttgctcgcgtcatatcctgtttatcgttatcagacagcgcgtcagcaagttcttttttacttgccgtgttgcctactgagtcaacgaatacaatcaccttatcaccgcgttcaagcgcgttaagctggcttacaacgtcattacgcaactgctcgaccgtcgtgatacgagtatacacaacacgatccggatcaacacccattgatttcagataggatttagtaacacctttttctgaatcgtagaacaggcacacagcatcttcatacgttttgagataagccgctacggtcagcaaacctaagtttgatttgaagtgtttggacgggccagcgaaaagggtaagaccagaagttaggccaccgttaaacgcaccggacaacgccagattcagaatcggcacacgggttcgcgtgatggtaatattgttgaatacgtcgctttcagaaagtacagatgcagtttggctattcgagtttttgatcagtttttttagtagtgctttgtttgacatttaatttttccgatttattcattgtcattctatatatctcactagttaatgaaaggggccgaagcccctagagtttaccagtcaccaaacaggtcgtttaaactggcacgtttttcataatcaattttacatacttctgtgatgttagtcaatggactaataacatgtttttcaaacatacccggataatctacccatgcgagaatatcactttcgatctctgctggtagtctatttccggattgccacgcgatgcaatcagcttgccacgggtttttatcccttagtggtagaaccattaccttttcaccttccatgattggcgtaacaccatcaataccagcagtgaaacggttaaagaacaacacccctttaatatggtttggtgttccctttattggatagccagccccatcacgatatttcgaaatgttgttggcagatgatacaccagcaatttccctgtagtcaagctccttatattcttcttcgaactttttataatgttcgtgcaaagataattcaccttcttgcaggatacggcggatcgcttctttcaggaatactttcacagaggtcggagtactcgatcgctgtgtttccatacccatgattttcaatttcggtttttcatagcgggttccttcggagtcccacacgttagccgcatatcgttttttagcagtccagaaacttcccaacccttcggaacccagcggaggcccagaaatgatttcacgatccataaacatcaggtgttccacgttgttcatgtattcgcaaagttcacgataccctttatcgatcatcggttccattctttctttagcaaagcgatccaggaagtcaacccaatggttattatccttaaatttagcctcaccaccaacttttgcaatcacgttatccatgcaaacataaatggagtcagtgtcacagtaccgaacatatgcatgatccgtagtaccgcacaggtcgttaaggtattcgttcaccttacgttcaatccactggatagccaactgcccgaacatggtgatcgcgctggcgtttcgtagatcaaagtatcggaagtgttcattacccaacgcaccataaagggagttgatagaaatcttacggttaagctgtgcggtgttcgcttgtgcgatcttcttctcacacacgcgcttaactgctttaagcatttgtttcgtaagagttttcagaactgctttcgattcatcactgaaatctgtatagaaatcaaagtcaggatcaaccatttggttatgcgcgtctgttaagtgttcgagttcatgcttgatgagttcaagatttcgctcacccgccatcattcgttttttccacatcttacgctgatcaaatactttcttgatctctactgggatcacgcctttgatatcacggcggaacatccacccgttaggagaacagctaaattcatcgctagggcgcggcgcggtcttattaatatactcttcaagagcacgtaccgcaaaacttcccataatcgtttcagggcttatattcacctgtcggatgatggaagggtacaggcttgttaagtcaaacgataccatgtatttgtaaggcccaggaactggatccttcacaaatgccccagggtaaggggttttagtatggcgtctgttttccggaataacaaccttatcttcacgcagagagttataaatgatcgcgtcccacgttttcagcggagacataacccctgggaagttaatttttgcatagtacgctacagacagaaccagttcaataaagtttcgtttaccgtcgatatcaagtacgcggataacgtcaacaatgttgtacgtgatgtacagttggtgatcgcgctggcgtagttcagacagggaaccttcatactcaactttatttttaccagtttcgtattccgcgatcgcgtccaaacggtaagacggttgcggggtaaagctgaatttcttatacagcgccataccatccatttgagcaacgccgaaaatatcatatcctaattgttcgttgccgtaagcgtcagtagtggttctggcggttactttaccaaatgggctaaaatgccttaccacgttttgaccgaaaatgttcaggtatcgcgtgatgatatatgcaatatcgaatttgtcagagttccatcctgttacaataacaggggttcgctctttccaatctttgatatacgcagacaataacgacttctcggtctggaaagaccgataaacaattttgtttaaatcttcttcgctaatgtctttgcgatcaacgttttccgcgcaccattccgcaaggccaccctcaaccagatcgtatacatagaatttatcttcaatgctatcgtaatgggtaatcgcatcgattggatattttgcttcacgcggatccggaaattctggggcggtcacctcgatatcgatagaagcaatgcgaatgtgttcgcggttgtattcgatttcattccggtacatgtcagaaatgtaagccagtcgataatcgtccatacctagcgcttccatcccaacatcgcgcatacgctgcatccagtttttagcttctttgatgctgtcaaactgttttttgaggcaaggcttgccataaatgtctttgtatggggtttctacgccgttcatagcgtgttgatacattacgggcgcatatttcgtcttacgtacctgttcggtgccgttagagtcaacgaagcgctcataaatggtatctcccatttgttcaactgataggtaaaattcattcattggatcttgtcttctccattaatataatgttccattgtaacaccacctacagcaaattcaagtttactcgatgttctaaaaccaacaaaccttctgctaacaagtcacggatctttctcagttgaacaagctggcgttcaagtttaaacccgtcgaataacatgctgaaaatactggaattgacactatgatattttgcttctgcaattccctggttaaccatcatgatagctttgttaaccattagtttcctttccgttactgtatgttcatccagttgacaggttgcaagggaaaccagatcatcataagcacgttgatcaataacgttatccatacgggccgcgaaaattttattcatgtaagtgcggatcattgcgcgacctccattcttttcataaagacttcttttgcttgttggatcaagtccagagattttttaatacgctcatagaaatgagtggtttcaacttgattgcataacaatgtgtactctgaaatgttacgatcgtaaaatccaggaaagtagtgctgtgcatagctgtaagtgcgggtatctgacagattgcaagttaacgataacaagatgtcatctttcacaatcgggatgattaaagtttcgttggatttgattgaatcaatgatttcgttaatagtcataatatatccctctcaatggtgtacacccaatataacaaagcccctgcacgaatgcaagggctttttgattagtgaccgatccggtacttgtacttgaggatccaatctgctttttgcgagtgagtcagtacgcggaagttgttttcttctgcaaacttcaacccaggggttacgatcttaaccatgccccactcttcgagaagtcgcgcaatgttgttccggcgtagttcgtcttcttccgtcatatcgacttgacgaccatcgagtttcaacagttccttaaaatgcacgataaaatacttaccttgctttttcagaatgtggcacgattgccagagcattttctttttgttgttcgcaataccaatacgggttagcgtttcacggatctttaaaaaagaatcgtcgctgattagttgaatttctaacatacatcaccattgtttaatcaatttttccaatttcttttgttcagctttgtttttcacaatacccaacaaagacagagcgacctttgcgtgttttcttttccaatcctcgaacattccgaggtctttaagttcctgcaaatattccatcgctgtacgtgtatttacactgtatttttcgcgaaggatttcgataataattttctcttcaaaatcttccgatagtttagcccatgcaccgaagcgtttagccttcctaacagagttgagataatagttatagtgcatttggtcagagatactaccgcctaccagattcatcacatacgcgttgtatatcgtgtctatgtgctggctcattgcgttgtctacaaagtacttatcatacacttcatcgataaccagcggcgttttaccgttgttgatttcgtctatgatgttaaacaaggtgttttctttatccttgccgtactctttgaccagttcttcaaccttatcccaatctttagaaagccaagcggattcatgcggggataactcttcttcatccagaaattccgccaggctcatgattacgcctcccagaccatagaaagcatcaggttcatcaacagatattgcagatgaatttctttattcatcgccagcccatattgcgcgttgttttcgcctacaatctggatcagcgcgattttcgaatcctgattcacgatcgggtaaatcgtatcagtcaattttccgataaaggtatcgtattctgacgcatatttaataacctcagagcgcaaccctttatagttcttttctttcagcagggtaatgatatgagacacatcagaaccaacgatctcattcaggatcccagcatcaatttcaccacgttttgaatagaacccgatcgctttgataatagaacgcgcatccggataatgctctttaacaaacgctgcaatgactttaggatcatacttgatattctcgatttcaaggataccgaaacaacgcttgattaactgtttcatcagttcgatacgttcagcatcagacggaacaccgaatttaacaggaggacaacgagaaagcagagcactatgcacaccgttaatgttgttcgctgttacaataacagaaacgtttttactgtatgcttcgataaagctacgcaagtgtttctgtgcttccgccataccagaacgatcgaattcatcaatgatgataatctttccgcctggtttctgcgtcattgatgaagcaaaacgatccagttcattacgaatgaagtttacaccacagttcgaaccgttgacaaagaacacctcagcatcaacctcacgggccaacacaagcgcgagggtcgttttaccagtgccaggggaatcagatacaagggtcatgttctcaacacgcccagatttgattatgccccgcatagcggctttgtcaccagaaggtaaaatacactcttcaatcgttgttgggcgatagcgctgatcccatgcaaattcatcaggagatcgggagattttaccgtatttggtttcgatgatttcaatattttcactaagttccataatataccttcaaaataaatggtgtaaaagaaaggggccgtagccccttaaaactatcttacttgaatgtgctacttgcttcaagtacgacgacgtaagcaacgccgttatcagaagagaattttgcggcccctttggaggaaatctctactttgtaatcgctgttgatgaactgcatgttatcaatcttcatatcaaaattaaaaacattgtcgccttcatactcaccgacttcaacggagaaagttgattgactttctttgcttttcgcggtgatgaccagtttaccatcaatcggttcaacggacaggtcggtcagtttcatcatgcgagacgctttgatcagtttttcgaaatcgttagcggtaatctggaaaatcagatctgctactggcatcaccaaacgttttttcggtttcgggatcgttgttgcgtctgctgaacgttcgatgatcttcatcttgtcaccgcgaatcacgatttcgccagtggaaatatcatgggtgatttccgcgtcagtgccgacgatgttcagcatgttcaggaatgagttgagatcgtagataccaacatcttcatcaatcacatcagcaatttcagcttctgcgtatacaacgctgttgattgatttcgtcatgatgaatgaacctttggtcagcatgatcgaagagttgatttgagaaaagtttttcaggatatcaatagtttgtttagagaatttcatattcagcctttagttttcaataagtgttacttaataagtgattttacaacggtttccgctgctgtgtcaagcatatcagccatttctttaacggttgtacgcttaggatcttcgcggcgttcgctggtaagtttacgatgttccgcaaccactttttcatcaatgtcacgatagtgtttaaaacgttcctcttgaggcatagctttaaacagttcttttgtttcgtccgagagtttagcaacccatgatttacggacgcggttcatgtagtcaacaaaaacattactttcattcatatatttcttctctaacttagaattctttgagtgggggccgtagcccccgcttgtattacatgtctaacagtttatccaggtcatcatcaccggagctatcagaatcatccaggtcgaacggtacgccgtcatcttcgcctaccggaaccgatgctacaccaccagatgatttcacatcagatgtctgattgtcaaacttagccatttcgttatcgaagttgctcagttcgctatcaaggtcagcggaagcgctggaaccagcagaaccgatcgaactacccataactttattgaagcgagtagtcaggtcagccagcggtttgaattcgctttcggcggtgatcgggcggagatcgctcataccttcgaaaattgctttctgaacttcttcatcgtcgatgtttttgatcttagccggaacaccaaacgaactatcgtcatagttaggccaatcaccaacttttttcgctttcagggtgaagttagcaccatcaaacggacaggttacagcaatacccggttcatcaagttctggattaccgttaattgcggcggtgatcttgtccatgattttcttaccgaagcggtatttgaacaccttaccttcgttttccggagcgcctgggtctttaacgatcaggacgttagcccagaaactttgtttacgaccgatctggctcagtagcttatcttctggcccgtttttgttggctttagccttctcatacagatcgttttcggaaatgtacttacatgcaggacagccgtcataatcgccgtgggtagaggaacagttctcaatgtaccactggttgtttttcttgaaagagtggctcacgatacggacgaacgccagttcatcatcggaacgtgctgggaggaatcgaataacggcggaaccgtttttctgtgcgtccagggtcagtttccattctttctcatctttctggaagccggaaccacctttcagatttgctacctgtgcctggagtttagcgggatcttgacgtttaaaaatgctgctcatattctgttttctcgtttagtttagtttgattaacgtttgtttcattaagtttcgatattttatgatatctttttcagtaaggtcaaatatttttctgtatgcctttaacttaatgctaaagtcagaccaaataatatcatcagctacttgatcgtgtttatttatgatacctaaaaatgagtcaaaaatcaaaaacgattcgtaagatatcacatttgacaggacaagtttgcttatgtaggacgttgatgatttttcgctgtacttgaacaccagagacacggggatctctttcattttggcgaattcgtacacgtttttaacgtcatccacaaacacgttatctagtctttgtaactttcctatgtattgcctgtaaaagacaatactatcttcatcaacatcgcctacccagaaatccggattggctacgaagttggagaggaatataaaatagatttctttgaatgtaaagcgttgagctaattttacaaagaaatatctatcctttcgcttgttaaaggcgttttcactaactttgatctgccagttgtattgaaggacatcaaaacgcccctggaaatgagttttcatcgccagatataacttgtatacagacaaaggcacaagccgtgaattcgcctcgctatcagcaaatggagctttgaatctcacatgaagccgtccagagtggttgatgaactatgttcaagcgcaaccgatgggcgaagcatgttccctttgatcgcttcgtcgctaatcttatcaaggatcgcgcgaggaaccgttttattcagcatcgcataatcaatagaattttcatccatccattgtagcgttgcttccatgtaggttgccccctcagaggcaaccagattttcgatatacaaaccgacttcggtcttatttccgatcatgctttacgccttatcgatcatatcatacagttcgatcagttcgttgttttcttcttcgaaagcggtacgggcctgttcgtgatacagtttgaacagtttcccgaaggtttttccatcgataccgaaatcagttttcgctttggatttgatatccttgaacgtgccgttgaagatctcaacttgagttttcacgttggatgcttctttgatcagttcttttacctgttttgctacatcagggtttgtttgtaaaaattctacactcattttgttacctcaaaaatcactcagtttttcgaacatacgggaaagtttgttatccatgaagtaacgttccattttggctttacttccggattttggagtattatacgcctcgataatcgaattttcaatatcttttggtataaattcgaaatcgcgtagttcctcgttttctttgtaacgagcggcccattcaggggtcatcaacgttgtcgggtcgtctgcctccagccatgcctctaactcagaggattttaccgctggggcgcgttcgccttcaaccttcgtcacaatataatcatttctaattttaatgcaagcgatactatcttttttatcacctttgatatttttgtatcgcagatcgttacgtggcgaaccgtacttaggcgttacccattttttctgggtaggcgaccattgacgaacaccgttatatttctgtagttgtgtaaagtcgctatcagcagaaaccactaatactcgtctaccttcaccaacagcttttttcgtaacaacagcaattatatcatcagcttccgcgaattcaacctttaatccgagataaggcatattctgacggatttcttcgaacaccggattcaggaaattgttcagacgatcccaatcccattctgattcttcgtgttcgatctgacgacgttttttgtagtaccaggctttttgcctacgccagtaatttctgtcatcgaaggcaatcacgatttctggatactcacctttaaattttacaacgttaaaccgtaaagtgtcaagcaccagatgacgaatcatttcgatcgtgatggatgcttgttcctttggtttgaagttgttcatcagtgtagcgatggaaatgttagagatatcgatgaccatagtatcatcgggttccccttcatcttgcatcagcttgttcaagttaaacatgcttgcaaaactgctcatacatacctcaatttttcaaagaacggggttattgtagtaacttacgaaatgaagtcaatacaaaagaccataaaaattttgatcaataatacttgatctgatcaaatttatgatctataatttattaattaataattattttactacaatgatcattgtaggtcaagtactaaaatcaataaattttatataatttagatctgatctatagatcattagatctactttaaccttaaataatatagaatgaaatttgattttgtctacagttattatataatattcttaacttcaaagaggaaatatgaatactatgactaaagaaacaaccaatatctacgcagacaatgaaaaattataccctatcctctgtgcatggaaaaagcaaatcgccgaaacaggtgatcgcaaaatgcctaatgagttgggggctgctattatggatattgcaaacgggctatcacgtcgttacaacttcaaccgttattccgaagattggaaaatggatatgatcgatgacggaatttccgctgcaatctcaggactgcataacttcgatgaaactcgttataccaacgtttacggttacattaacaaagcatgttggcaagcattcgtaacacgtattctgtacgagaaaaaagagaacgcgaagaaatataaattcttccttgagcacgtttacgactgtgaagattcagatatggttagtattgcagacgaaggtttcattcaagatctacatgacaaattatctcagtacgaggcttccgccaccaaaaccaaagacaaggaagcggaagtattcccaacattggaagattttctatgaaagcaataattgacttaaacaaaatattaactgatatcgattacgaaattgacttgctaccctacttcgtaaaattagagttgcaaaacgtgggaatcccggttatcatcgatccaactgacgtaagaaaccccgatttcgaagtagaagaaggggttttgtcttatatgataaacgccgaaactatgatcatggagatcacttatgattgatgaagagaaagaagtactaaccagtgtggaagaagtggatccggaagaggaaattcgacaaaagatccaggcacgtgtagaagccgacgcattgaagcgagcacaaaaattcattaagaagaaccggactgagatcaaacgcctccgtagacacgcagaggaagccctattcaggggtaataaggttcagtatgtgtatgcggttaagaaactacgtgatatgctcaaacagccgtatacagaggatttcattgatacgatgtggaacacttcactagcatcaattcgaaatatcgtagcttcacaacagaagcaataacaaacaagtagccccgaaaggggctatgagggtcttatgagaaagtacttaatgatcggggatacacacgctggcttgcgtcaggacaacccctggaatgaagaaaacctatacaatgtattcgtacaaatcgtagaacactgcaaagcaaacggcattaccgaggctttccatgctggtgatttctttgatgtgcgcaaggccaccacacaaaccacgatgaaattcattcgtgaacgtattgtgccattactggaagaagccggattacatatctatgttctggttgggaaccacgattgccagtttaaagacaagatccgccctaactcaccgcgagagattcttgatcagtatgattgcttcacggttgttgatgaaccgatgacagtaaatcttgatacttctccgctgcaatcaatcgatttgatcccgtggatttgtcaagaaaacgcacagcagatttttgatttcatcaaaaagtcaaaatctcaatactgcttaggacactttgaactgtccggatactatttctataagaacagtaaagcggaacatgggcttgaacctgatttcttaaagaaatatgatatcgtgtattcaggccactatcatcacgctaacgaaggcgctaacgttttctatatcggtacacctcttaccatgagcgcgaacgatgaggacgaaaccaggggattctatgagctatcttatggcgacggtaaacgtgaattaactttcattgctaacccagtatgccaccatcgccggatcacctatccggatcaaaaagatgttgatgttgcagattacaaaaattgctctgttcgcttgattgtacgcgaagttgataacgatttgcctaagtttcaaacaaaactggaagaaacagtttatgagttgaacatagtcgatcgcgtgatcactgattcagaagtcgatactgattttgaaatcaaaagtgtatctggattgattagtgagtacatcaacaacatgcagatcactccagaagaaaagaccgaagtatctgcaataatgagtgcattgtatgcagaggttacgagcaatggaaatagttgattacgttaatattttaaacgaagaagggcgatataaagccctttataaaatgtttggatttgatgtgattgttgcagtacagcaggattcctataacgagtatgtgtcattggggttcactcttattaaagacaactatcacgaaacaaaggtttggacatttactgtcctgaatagcatggatgaagattccgtgatatactgctttgatagcacgattacaaacatgattagtgatatatcccaaaggataattgatgaaactcaaatttaaaacattgacttatcaaaatatcttgtcggttggtaacgtaccgatcgtcattgattttgattcagcaaagaaaaccctcattacgggtaaaaacggcggtggtaaatccaccatgatcgaagcgcttacatatgctctctttggtaagtcatttcgcgatctgaaagtcggacaactggtgaacagtatcaacaagaaaaaatgtctggttgaactgttgatcgaatacggcaatgatgaatataaaatcatccgtggacaaaagccgaaagtatttgagatctggaagaatggcgaaaaactgccggaagattcagccgctggtgattatcagtcacagcttgaatcaatgttgaatattaacctggtgggctttaaacaggttatcgttctgggtactgctggttatgtacctttcatggaactaaaaacaccagatcgccgtaaactggttgaagatttgttgtctttgtctatcatcagtgaaatggacaaactgaacaaatcatacatccgtggtgttaaccgtgaactggatacgctttcaatgcagattggacacgtacaacagcagatcgcaacacatcaaaagttcattgacgaacaacgggcaaaagcaaatcagaatacggcgcgttaccaggatatctacgattcccacgtagaaacagcaaaacagattaaagcgcaattagttgaacttcaaacccagatcgcagaatgtgtgatcaatggtgaagaccaaacagcaaatattcaaaaactgcgtgatggctatacacgcctctcaatgaacgtagaacagttgcagcgtcttgaggtgatgtatcgcaagggtggtgaatgtccggcctgtaaacagccaattagccccactcctgaacgcatggaagagattgccgagaatattaaaaacggtactcagaaacttacgctgattaagaacaaacaagatcagctacagaaaatcatggatgatttactaacacaacaacgtacactaaatgggctgaaatccaaatacgaatcactacgcggtacacttcaaaatgaagttgcagcggctaaacgtgttcgggctgtcatggataaagcacaggaagacgtggtgatcgacgaatccccagttgaaaaactccgtgaagatgaaaaggaacttgattccaaacgttctggatttgtcaaggaaaaatatttcagaggtattgttacggatctgctgaaagattccggcgttaaagcgagcatcgttaaacgttatattccttacttcaataaacagattgcgtactatctggatctgttgggtgctgattatcagttcactctggatgacgaatttaacgaatcgattaaatcgctgggtcgtaatgattttagttacgcatcgttcagtcaaggcgaaagagcacgtattaaccttgctttattgttcacctggcgcgatgtaaccagtaaaatttctggtgttgatttatcccttctgatcctggatgaagtttttgacgggccacttgaccgagaaggttcatatgcaatcaaaactttacttgacagcatcgaaggcaacactatcattatcagtcatcaggatctggatccgcaagatttcgaccgacatatcaccatgcagaaagttggacggttcacaaagtgtactatcaatgatcgaggtgcataatgttagaaagagaatttgaattagaaaccgctccggaaatagagcggttttatctccacaacaattttcttgaagaaaaacatatagttactatgaaagatgttgaggaagcattcaaacataatcctatagagttgacgcgaatcaagaacaacaaaagttctgtttggttcctcgaaaaaatctattgaccgaaatccataaatacagtaaagtagcccatgtaacgaaacgtgggctttgtttttatttgaggaacaataaatgatcaccgaatccaaaatgacttatcaggaagcactgaaagttttgggcgcaactggtagcgaaaccagcgccgaaatgtccagactcttcaaacgtgcatccttgcgcaatcaccccgaccgtggtggtagcaatgaattaatgcagaaaattaaccaggcttacgacgtcgttacaaaaactgggcctagtggcgcacgttctgagactgctggtgacgttcgcgcacgttatgcacgtcaaaagaaagaatgggaagaaaaagttgatgcttactttgtagtggcgaaaaactatttcagcaccaaatttaacgcacaggaatttgcggaatacttcaccaaatacactggattgcctaccacattcaaacaggaagtaacaaaaggtagtcacggtgtttatgcttcgttccgtttcacttctggtgatgcttactttgatttcggtttcaactgcacccctccgaatggacaagggctagccgctccggattcatctgcactgggtagcgtttctgttagtacctttgtactggttggaactaaaaaacacaaaatggcaagccgtgattatcaatggggcaaaaacccagataagatcactccggaaagcctgttcccgtctaaaaaactggaaagcattttcagtcctgtacagaaaaatatcaaatacaaacgtgctgattaccttgcatcattccgtaagctgttaggcgctgacattagcggaaacgatatctttgttgaagttggtacactgaaagttcgtttttatcgtcacgtattcatgcgcaaaggtgcttatgtgtttagcgcggtgtatgatcctgctgtatctaagtatcgtccggctgcacaacttcgcggaaccatgttcgaagatgaggacggcgcttgcctggatatgatcgttgatacgttcaaagagttgcagaaactgaaaccgagtgttcaaggcgttgtgaacgcgatcgataagatgaacgcagagtttgcagcggggcatcgttcagcatcttttgttaaacgtgtagctgctcaggaagccgcaccaaaaccagaagagaagccgaagcgcacagttaaccgtattggtaaagaggaatacttcgcagcactcaaagatattggtgctcgtgtaatgcctaccagcggttatgttgaatttgataacggcgctggtgttactatcaacttcaagcgtattgttgtaaaccgtaaagcatactactcattcagtagctttgatttcacgtactctggtcagaaacacattgagtggttgaaaggaatcgatatcgcagaagataccaaaggcgcaagcattagcctactcactgatactctgaaatctttacgtgggatctctgactggaacactgttaagagcgctttagatcaaatgaattctaacttcaaggcgggtaaattctcagcacctcatgtgaagaaggaagcagagcaaaaagcaccgaaacagaaagacgaaatcggcgcacagcctaccaaaccacaggcggctaagaaagatacaccggaagtggaaaaatcacaggctgttcatgcagcacgtgagaaagcgaatatgaacaacactattcgtaaaatgatgactatgttagtcaaagcacagcgcaaagacactccggaagatatcaagaaggaagttgatgcagcaattcaattgtggcgcttgacttactaatcaaatgaactataatgggaactgttaacgcagttccctttttatttgaggaaaatattatgagttgtccaacatggttacgtttggaaaatctgaaagaaggtacacaaaaacggatttatattaatcttggttgggttccgcctacagattttcaaatggctgagattttaatcaatgctgttaaagaagtaagcgacacttacgaatgggaaaggctctattttcctttgattggtttgtatatgacgcgaaataaatttgaagaaatgaaacttgctgttattcgcgctacgattattaattcccaacaaagatttactttgaaaaatgcatggagttctgaatgattattcaagtatctgtacagggtgacactctgactgtcaccgaatccatcaataccgctcttgctgtatgtcgtgaccatatctcacaaaatcctccagtgactgagatcctggaaattgatgtttgggatcagattgggatgatcgacgcatcatatggatttaccccgcgagaggaagaactatctcgtatcgaatcatggctgaatgaacaggaaacggaatgaaactccctaagaacacaacactactaacccgcgaaaaacttcactctgttgattggtgtcctctggatatcatgatttttgatattgaatctcgcgtgatcaatgcaaaatatcaggggtgtagtattttctctgttgaattcgagaagattcgcggatatgatgagaagtacaaagaaaaactgaaagttatgattgaagcattaggctatattgtaactgttgaagacaacaaaatgtggatcgcaatatgagcatagtaaaagcggtgtttgcactggggcatgatatctaccacgatgatttcgcttttggatatcagcaaggcttgccgtggggccactgtaaagaagatttacaaaacttcaaagaagaaaccgccgatagcgttttgatcatgggtgcaaatacgtttacctctcttccgggtaaactacctggtaggatccattgtgttttgtctggttccagtagttttttgaaaaccaaaaaaggcgacgttgctgattacgtgatccacggtggcgggttgtctgctgctattggtacaatgcaagcaacacacccagataaaaatgtgtgtgtcatcggtggtaaggggttgcttttagattcaatcaataataaaatggttgatgaagtagttttgactcacatttatggacatcatgtatataatgccccatcatttaaacgcgatgtttcgtttactgcttctgaattgggtgatgtattgttaaaatatgaatttactgatttcaaaactcagtacatcaaagaacatgaacgcattgaaaaaattgtagtagatcgatataaaaaggtataaaatgaaacagtatctggatattattaaacttgtacttgataacggtgtcgaatcaaccgatcgcactggtgtaggtactattcgtattttcggcgcacaagcccgatgggatctaaacagaggtttccccgcaactacctgtaaaaaactattcttcaagccgtgcaagcatgaattgcaatggttcctgtccggttcgactaatgtcgaagaacttcgccggatgacctggggtgaaaatagtgataagcgcacaatatgggatgataactatgagaaacaagctattgatttaggatacgattctggttatcttgggccaatctacggtcatcaatggcgttcgtttggttctctttatggggatgatgatagttattatggcggtagtggtgttgaccagatcgcaaaagtcatcgaacaactgaaatcaactccagacgatcgcgggatcatcgtttctgcctggaaccctgttgatcttgatgatatggcattgcgtccgtgtcactgtttcttccagttcgttgtaatcaacggtaaactgtctctacagtggtatcagcgttcagttgatgtcttcttagggttgccgttcaatatcgcctcctatgctctcctgacgcatattatcgctgatatttgcgggtacgaagtgggcgatctggtttggactggtggtgatgtccatatctataaaaatgcggttgaacaggcaaaagaacttttacagcctaaccgttcaccaatgccattaccgattctaaaaatgccgaaggtaaatagcttacttgatttagatcaagaattctttgactcgataaccttagaagggtatcataatcacggctctctaaaagctgaaatggcagtatgaaaaatggggcttcggcccctttcttaacaaggtaagagaatgaatgacattaaagtagtagtaaaatcctctggtgtacgccagccgtttgacaaagaaaaaatatacaaagtgctcaagtgggcctgtgatggtcataatatcgatgttcgtgcattccttgaaaatgtattagaactgatccgcgatggtatgactaccaaacaaattcaacgtatcgctatcaagtatgcagcagatcatatttctgttaaagaaccagattggcaatacgtagcatcgaatcttgaaatgtttgcattgcgtaaagacgtttacggtcagttcgatcctatcccgttctacgatcacatcgttaaaatggttgaagcggggaaatacgataaagagatcctggaaaaatacagcaagcaagatattcaagttttcgaacgtgcaattgaccatgataaagattttgaattttcgtatgctggttcccaacagttaatcgggaaatatctggttcaggatcgcgatactggcgaaatctttgaaacccctcagtatgcgtttatgcttattgcaatgtgtctgcatcaggaagaaactgggttagcacaggttacgcatatcattgatttttataacgcaatttccgatcgcaaactgtctctaccaactccaattatggcgggtgtacgtactcctacgcgccagttttccagttgtgtagtaattgaatcgggtgattctcttggttctcttaacgctgtaacctctgcgatcgtgaagtatatttcacaacgtgctggtattggggttaacgcgggacatattcgcgcaatgggttctaaaatccgtggtggtgaagctgttcatactggtgtgattcctttctggaaacatattcaaaccgctgttaaatcctgttcacagggtggcgttcgtggtggtgctgcaacactgtattatcctttctggcatctggaagttgaaaaccttctggtgttgaagaacaacaaaggcgtagaagaaaaccgcgttcgtcatcttgattatggtgtacagcttaaccagttgatgtataaacgcttaatgaatcgtgattacattacgctgtttagtccggatgttgctaacgatcgtctgtatgatctgttctatgaagccgatcagactgcatttgaagaactgtatgaaagcctggaaaaagacccaactgttcgtaagaaacgcatcaaagcggttgacctgttccaacttttagcacaggaacgcgcacagacaggacgcaaatacattttcaacactcatcacgtcaaccaacagggtagttttacggttcctgtccgtatgtctaacctctgctgtgagattgcgatcccaacgtcgccgctggatgacgatgataaaatggctggtgaaatcggattgtgtacgctaatggctatcgttctggataacgctgatatcagcgaattcccgaaactcacgcgtattgcagtacgtgcgcttgataacctgctggattaccagaactaccctgtaaaagccgctctgaaagctaaacagcgccgctctctgggtgttggtatcaccaactatgcatcatggttagcaagcaactattgcgactactcagaagcgtatacagacaaagttcatgagctaatggaagcgtttcagtttaaccttctcgttgcttctatggaactggcgaaagaacgtggtgcatgtggattgtacaacgataccaaatacgctcgcgggttactgcctatcgattggtattgcaaaaccgttgatgaactggtagcacctgtttataattgcgattgggaatggttacgtagccagattaagaaatacggcttgcgcaactctactctttctgctttaatgccttgtgaaagtagttcacaggttagtaactctaccaacgggatcgaacctccgcgcggtttagtgagtatcaaatcttcgaaagaaggacactataaccaggttgtgccgaaccagaataaccagattgatttctatgatctgctctgggatatggctaaacgcggtaacaaagggtatctgtctcacgtagcagttatgcagaagtttgtagatcagtctatttctgcaaacaccaactatgacccggcaaactatgaagacgggaaagttaaaacagaagacatcattgatgatctgctgtatgctaactactacggtgttaaaaccctgtactatcataatacgcgtgatggtgctggtgatgaagatgaagccgccgacgattgcgcgggttgtaagatttgattaatgccccttcgggggctttttaaaggtaaagacatgttaacagtaatgaatacaaacccagatcataaccacttagatcaacctatgttttttggtgaagatactggtgttgcacgttatgaatcgcagaaacacaaagttttcgaaagcctgacgcaaaaacaactttctttcttctggcgtccggaagaagtcgatctatctactgaccgtatgcagtatgcaaaacttcctgaacatgaaaaaatcattttcgattctaacctacagtatcaaaccctgttagataccattcagggacgtgggcctaacctcgcatttttgccaattgcatccgatgtgagcatggaaacctggatcgaaacgtgggcgtttagtgaaaccatccacagccgtagttacacgcatattcaacgtaacttgcacattgatccttctgtacagttcgaccaaatccttcgcaatgaagcgattatgaaacgttccgcatcaatgacacggtattatgatactctgattgatgaatgtcataagctgaaaaccatcatgatgctacaggaacaggttagcggctataaaccaaatgatccggctgtcgtgtattataacgagcaatacactaaacaggccactaagtgcaaagaagcactgtacctttgtatgcacgctgtgaacgctctggaagcgatccgtttctatgtgtcgtttagtttcacctttaactttgctgaacaaggcaagatggaaggcaacgcgaaaattatgcgcctgattgcgcgtgatgaagcattgcatcagaaaggtactcagagtaaaatccgtttgtggcaaatgggtaaagatgatccagaaatggttgaaatctcccgtaggctgaaaaaagaagcaactgctatcttcctggaagtatatgaacaggaaaaagaatgggctgaacatttattctctgttggtgatgtagaaggtgtatcgctgaaaagcactatcgcttatattgaacaccttacagatcagcgtatgcgagcggtagggcttgattcaccattcaccccgatccctaacccgtatccgtggatgaataaatggctcaaaagtgataacgtacaggttgccccgcaagaggttgaagtaagttcttacctcgtcggaaacttgaatactgaaatcagtgatgaagcgtatgcaaaatgggccagcaaatacgcgtgattgtcgggtagtaaacaagtacaaaactgattgggatgtcgatattcaaagaggtacgaagttcggcaacccttatcacacaggaacaaggggagaaaacattttagcgtttatcccctggttccagaatcaggttcgtactggggcgatcacgattgaagaattgaaagaacttgatggtaagaggcttggttgtacttgtgcgcctcttccctgtcacggtgattacatcgcgcatgtggttaatgttttgtgtggtaagaaaagatcacttgactttttggatatataatgtatgaaatctgaattcaacttaacccttgataaatgtggtcgcatcgatcgaagttttgttaagtgtggtgaacttaggcattgtgtttattttattgcaattaacgatgaaatagtatatgttggtaaatgtcgggatatgtggaagcgtttagacacatatcgcaatgcaaagtattggagagaagccaaccccagcaacatcttaaaaacgtgtcgattggaaatggctatcaaaaaacgaaaaactgtgaaacttatcgtgactactcacgatgaaaatacatatcatgattatgaaatcaacatgatacgaaaatacaaccctgaatggaataaacagcactatgacaaaggcacaaactaaaattatcaataccctttacaaacaactcatgcagttgtgtggtgaatccgaaacatttttcttcgttgatcaagtaaccgtgatgggtacacctgttcgaatctttaactatcgcatggcctcatatacagactggctaaagcctggtgctctggaatgtcgcggtatcatgtttgaaatggatggagatacccccgtatcaatcatcagccgccctatggagaagttttttaactatgccgaggtaaaggcatgggaagcgcttaacgagtctcctattgaattaggcgaagttttagacgtgatgattaaagaagatggttccttgatctcaactttccttgacggtggatttctggcggtcaagtctaaaggttcggttaaatcagaacaagctatggatgcgcacagcgtgttaatggcaaatcgtgaattgctgacccgtttaactgagatcgcaaaagaaaactatacggtgaatatggaatacgtttccccgaaaaaccgtatcgttgttggttatgattctccggatctgcgtatcctgaatgttcgtcacaacatcacgggtgaatacatcccttatgatgatctgtttgctgacgcgctgttacgtgcgtatctggttaagcgcgagaatatcgaagtactggatctggatgcattcgcaaaagaagcatatcagaatgaaggattcgaaggctatgttgttctgacaacgaaagggtttgtaaaaatcaaaacaaactggtatgtcaacctgcatcgcacaaaagatagcattaccaacaataaggatcttttcctaaatattgttgagaatacggtcgatgacctgaaacagctattcagttcggatcttgtctctctgaaaaagattgacgatttcgaaaaacttttccttgatagtctcaatcggttgagtgcaaaagcattcaaagccattgaagataacaaagggaaatcgcgtaaagattttgctatcagtctaagcgcggatttgtcaaacgacggtcggatcatcttcgggcctcttatgaagtatttcgaagaaaccgatcctcaaaaactggttgaccggatcattgatatgatggttaaaaattacgaccagttcattcctgaacaatataaatgaggttcataatgcctaagatatcatcttgggtatggcctgtaatcgtggggctatctttgatagcccttttttacattgcagtcgataccaaaattgaaaacgcatcgttacgcaaggatatcaaatctttgcaagatgatgtgaagaaagtaaaagagacaaatacaagcaatactgttatctacgtggaacaaaaatccaaagatcagcagttagtcaaggattcagggcgcaaacaccttttgtttgagaaacctggattgattgaaatcaaaatcaacaaatccttcgacgaatacatgcaggaatttgaaaaatgaaattagcaatgatagtattacttggtgtttttctcgttggttgtgctgaacagccacctgttaaggtacttcctacgctacccgcaaaggttaaccccgtgaaggtaaaatggaaagtaattgcagacgttagagaaatcgacgggaaacaataccttgtaatgccatatgatggtaatccttatgttgcattgacatatccagattcattgattttacgtagctggatgaatgacgttaaacgacaaaaggatcaaaccgataatgttctgtgtacgttgggatatcctgagaaatgcaaatcaaaataaccaaaacgttttttcgtgacataacagaaggaaaagtttatactgcgaaaaaggataaagaaggtctatggatagaaaacgattggaatcgtgatatgtggctcaatctgacgaatgagtataacaaagaactaattgaatatgagatagtgaaatgaatctgtttatgactattggcgttccgggtagtggaaaaactacctgggcgcatgagaaagcccgtgaattgggtaatactgttacgatctctcgcgatgatctgcgtagctctttgtataatgctggtaaaggtgctggcggatacaaatacaccaaagcgaaagaagaaatgattgcagaaatgcaggatcacgttgttatctccactctgaaagatggtaaaaacgtgatcatacacaacacgcatctgaaagaaagtgataaaaatcactggcgtgaaattgcattggaacacaaggcagattttcatattgaatattttgatgtgtccattgttgaattgcttcgccgtaaccacaaacgcggtcgtgatgcattacccgtttcgcgtgtttgggaaatgtttaaccagtatcgtaaaatccgtgggttcgtaccagcaatggaaatcgtcaatccccacaatcagaagtgtgtgatctttgatgttgacggtacgctaacaaaagtagggcaacgtagcccgtatgactttaccaaagtgatcaatgatccgccaaacatcccgattcaacaactgtttcacctgtacaaaaatgcagggtataaatgcatcgttgtatctgggcgtgaaggtaatccgcaatgcgcacatgatacatgggttagcctgttaagttatggtgttgaaccggatgaaatttttatgcgtcaagaaggcgataccaggacggattttgaagtaaaagaagaaattttgtttgacaagattttagataagtattatcctgttattgcagtggacgatagagacactccggtcggaatgtggcgagcaaacgggattccgtgcttacaagtcgattatggtgatttctgattgacatctaatgtgggtatgttaaagtacccacaacaaaagaggattacattatgaacgttattcgtgaagataaaaacatcatggttgaacttggcgatcgcattcgcgtagaaaatttgggcgactttaatcaaaaagttcgtttgttgtgccaaaaaattgctaacaaaatccaggaacagagaaaagcacccggcgggtttgaagttagcgccactccggtttctcagtactcgtacattgtgtatattcatgacgtggatactaacagcacccaatctttcgggctggtgttaaatcctattactggttacgttacatgggcggttgtattatgaaagtaaaagtaattgatagagcgatgatcacggatgaatctgtatatccagatcctcgttattatggcggtgttttcggatacatcaaaggaactgatattgatgtagtaacaagtccgatcgccgaatacgatatcaacaaagatcagacagaagttcgcgttactacaatcaacggttcagaatatatcgttgaagcgactcctgattttatcaaacagttactaaaggtgatgaaagatgcttgatcatcctggctctatgagcatggtgcttctggaagcattgaaagcatatgatatcccctgtcatttcggtgaagtaactgttaatactatcgttgacgaaatcgacaatccaaatactttcattgcttgtcttgttcgaaaattcacaagttgttttcgtccgagtccggaaaaagtagtcattagttctgtttctgcgcatcatcgagtgttagatgatggaaagattcaagtttactggaaagttctttatcacgtggtatatcatgaagattgatgatattatgtttatgcttagagcggtaagcgcttctaagttctctcaatgtgtctctgttaatgtcggtgctgcgttgagaaatggtaatgggcgtgtgtttgtaggcgcaaataatacggttgaccctagtcatcgttgtacagatcagtgcaatcacttattagatgataacggaaaactgagtgaagaaaagcgccctgaacattcacaatggtcagatcgcaacgaagtacacgcagaaatgcgcgttattatgctggcggcgtctcatgaacaaatcaaagacgcaactttgtatacaactcattccccttgctcacaatgtgcgaaaaatattgaattttgtgttgcaacaggtatgattaagcgtgtagtatatctacataaatacgatcgtggtggcatcgagtggatatggcgtctacaacaatacggtgccgaagtagtacaacttgatcccgaagaattgaataaacatttccggatcaaataaccaatgagtaaatgtatgtctgaactgagtgtaaaagcatcctttgaatatgttctgattgaaaccaacgctaaagcggctggaactgaaattgtatcaccttctggtattgtgactggtgttcgtcaacacggcgaggaaccgatctacggcacagtgttatcatgtgggccggatgtaccggaagaatataaaaccctgcttatgggtaagcgcgtaccgcttcctcatgcacaaatggcaaacgtgccggatcctgaactgattgcaggaaaggcaacaaaagaagaagctcgcaagtatccggttaaatatgtaaccgcacactataaagcgattcaagcaatttacgaataagagatccaacatggctaaacaaattcaagcaatcatcgccgataccgtcgcaaaatccaaaaaacttttcgacaaaggcgacatcctcgaagcaccgacccgcatcgatgtaatgacttcaatgatcattgatgctcaccagggaaaactgaattcccgtgcttcggaagtaatggaatacatcgtacagttcgaggatgtatgcaaatacgccaaagctgttgatccggctgttcgcgaaatctaccgcaaacagttctaaaaatatcggccccttagctcaataggtagagctaatcactcataatggttaggttcccggttcaagtcacgggaggggccaccaaacaaggcaaggcacttagagaagcgggaggaacagaatctgattctgttggttgtaggtgcaaatcctacccttgccaccaaatttgggtgcgagcgcaatgccgttaaatggttcggaatatgcaaccttatccacgggaaaggctctgttggtatccggtaataggttccccggaatgcggggtgaagtaaagaaactcccagcccactaattttaatgaggtttatatgaaatttcgtgaaactgtgaaataccataacgcggtcgaatatacacagatttttgttgatatgtctcccgcaaaattcaaagaacgttatggcatgacatttaatgaatggaaagatggattgcccgatggggactaccgaaaaaacttcaaattcagtgaatgttatgtagatgacgatccttacgatcaggatattttcggtaaaacaacacctctcattgagaattcaccagaacagctttacgaatcttgtattgattccgcatacgaaatttaaagagatatcatgaaaaatttacaaaaactgtttgaaatgtctccggcaattagaaaaatcatcggagaaaatagcaatccaacgaatcgcaataaaaaattgatggaactttttgtaaaagagttcgatgattttgattctgaacttcataaagcgcttgaggcatattccaaacaagggttctttgcatcgccgcaagtaaatagcaagaaagagtatagcgaacgattctttgattgggagattgtcaatctcgttcgtagaacaaatatatctccgagcaatcaccaattgatttctcttgatacttcggtattctttatccagtatcttatcagtggtggtttcaaaaatcctgaaattccgtttacaaatgaagcggttagcagtgaatttgatgaatcatttgtatacatcaacacaaacaaataatcaaatggctatcttcggatagccttatttttggggtgtctatgcgctttttaaagtatgcaagttggatcgtactcgtccctcttgacattattactggagtattagcaattctgtttgccccgtttgttgtaccgttctacaacgagaaaacagggcatcttcctaaaggcttccggtggatggaaaccttcgataaccctattgatggtgatggtggacatatccgccgttgggcgtctatacgctatcatctggggggttttggggtatacatgcagcgtgttggctggttgtggagaaacaaggcttataacttcgcatatcacgttttaggacgtgaagcgacaagcaaattcaactggaaaggcaacccaaaaacagaaggtgggccaaaccccgtaaatcatggatatctgctcatgtggaacgaatcagcatggggtttgtacgtttacaaaccgtggctacggatccacaaagtgcaattctgtttgcgcgtttatgctggatggaaactgaaacaagaagttagcgacccagttaacctggatcgtgcaatgctggcgtttcatttcaacccgttcaggtattatgtaatcaagtaaaggtaatacaatgaaagcatttcaaattttagaaggtttgcatactggtacgatctatctggaagaaggtaacgacgttcggatcgtagtatcaaaaacattaactatggattctgtgatcggtaaagctcgcgttactccgtttgaaaagcgagagattgagatcgaatatcaaccaattgttaaggtggaaggtggacagcatttaaacgtaaacgtgttgcgccgcgaaactctcctggatgcggttgaacatcctgaaaaatacccacagttaacgatccgtgtttctggttatgcagtgcgttttaactcactgacccctgaacagcaacgcgacgttatcgcccgaacctttacagagagtctataatggcaatttctgatattacgggttataaaccccatactgataaaaaagtagaaacagtaaaccgtatcaaagatgctgaaaatgcattaggtgcaatcctggaagatatcgaacagcgcctatcaaattcagatattgattcgctgatagatgaagaattagatgaggtgcttgaacgtatccatcaaattcaactggcgaaagaccgactgaaagaagcctctatgtgggcgtgtcgtgcggtgtttcagcctgacgaaaagtattaaaaatcaagccgttgccgaaaggtagcggctttttcttttttggtgtaaaaagttgttgactcccttctcacattcccttatagttaatcccgtagacaagaaaacacttttatgaggatgacattatgaaacgctcttacaacatgaatgaactggttttcttcaaaactcgtcgtgaagcacgtgcttacgttctggcggctggtaaaaatacttctgctgctatcgatatgggtactgataaagctgttggtgctcgttgggccgctgttatcgttatcgctgctccggttactccggttaaaactctggtacttggtgcgcgtcacgccgaaactcttaacactgctgcaagcggtaggggccacgaagttaaagtgttcaagaagcgttcttatctttcatgtgcaaggggttaactatggcacgattcatatataaagtggaatacgaaaatactgagttatctgatacctttttgaaaatgattcgtgatcacgggcaacgtctggaaagagtaacgattgatactgcgtttgattgtcctgttgggttggttctaacattatcttgcagccccgcaaaagaatcagcccgtgtcgaaatgttacataaactaaatgcattttatgaaggtggtagtgtatggcgagtattgtaaaatttttcaccgactcagtgaaagaaattaaaagcgctctggaacaatggaacactcgttgtgatgtatccattaaatcagagtacgaaacaacttatgaacgttatgatccggcccgtggtttgcacaataacccccatgaggtggaagtgtgaaatactacggattcaaaacgagtcattttggtaaagcgtatcgtacagaaaacatcgatcgcaaacgtccgtactatgattctttagtacgcgcgggacgcaaacgcgctcgccaggaagggaagaaagaaggtgaagatcgtggataattggaaaacatgggtatcaattatcgttggtgttatcatcggtcgcggtttgtatgatttaatattttcggcgggggttcattatggacattggttcgggtagtcagtacccatcatgcgcgttaagcaacttcgctccgcatccgtttacgtttgacggggtagaatgtgcatcaatggagggctttttacaaagccttaaattcagcaacccagatatgcaagcccatgtatgtactctggtaggcaaggccgcaaagttcaaaggcaaaaagaaaaaatggtggactaaccagaccttatactggaaaggtatccctattcatcgttcctctgaggcgtatcaaatcctgattgaaaacgcatataatgcgttattccttaatgaagggtttcgccgtgcgctggcagcaaccggaaaaagtaccttgacacattcaatgggaaagaataagatgaatgaaacggtgctcactgaacgtgagtttgtccgaaatttaacccgattgagagatctgttatgagtgaaaaagaaagagtagaatgcgtgttcctgttcaaaggcgcgattaatccattagcgttactgtatgcacaacatgcattacgttcaacgttgattcagagtgttatctataaagcaggtgtgtattatgttaccatcggcgcaaataacatggttgttattgaatcctatgttaaggaatgtgcatcaaacggcgttgtctttgataaagtcgattttgatgcaggggtagatgctgtttatatgtataagggttgatatgagttacgtagtttatttcgattgttcggatctcgatccgttcgtgcttcaacaggcaaagaaatatcatcaagatgtcgttggcattggtgtaacaaatgatgatatgttgtgcatcgaatttgaatattatcggacatttgagcgtgaacaattcctgggtgaattgaatgcattcaaaagtacccttttctttgatcgttatgaggttatatcttgaaacctgttattcttaccgatattgacgggatcgccgtaaaatggcaaagcggcctcccgttctttttgtctaagcacaacatgcctactgatattgcattagaaatggttacagatgaaaaatttcgtgatatgacagaaatcttcggatgtgatcagcagttggctaaaatccttatggaagaatacaataacagttctttcattcgttatctgaatgcgtatgatgatgcattgattgtgatcaaccgtctgaaaacgcagtatgatttcgttgccgttaccgctctgggaacaacaccaacggcaagccttaaccgaattgctaacctgaatactcttttcccgtctgcgtttaaagaggtgatggtcgtgggccacggtgaaacaaaaactcatcgttacctggaagcaaaagcaaagtatggtaatcgtctggtttgctttgttgatgatctcgcgataaacttaaacgaatgtcataacgtcattagtcagttgccgttattccatatgttacgtggtgaacgtgaagaaacaaatgcacctcaccagttagtaaaatcgtggtttgaaattgaagagaaactaaatgatcttgtcaatccttaatgaacttgcgtctactctgaaaaccaaagagaaagaagcaattttaaaacgtaatgccgataatgaattattgaaagaagttttccgcattacgtatacaaaacagattatgttttatgtgcgtcaatttcctctggtagaagggaaaccaggcacaacaccgctttccgatgcaatcaaagcattactggaagatttagcaagccggaaatatacaggcaatgcagcgcgtgatcgtttactggatattgtatcatcagtgaacattaacgatcgtgaagtgctacgccgtatcattaaccgcgatctggaatgtggtgctggcacaaccttaccaaacagggtatggaagaaactcattcctgaacagcctcaatgcctcgctacgccgtttagtgaaaaggctttacgtcgcatcattttccctgcttactcgcagcttaaagccgatggtgcgcgttgcatggctgatttgctggaagcattaaaccgtaaggtatcgagagcgggtaacgagtacgaagggttaactcagcttgatatcgatctgaaaaagattcgcgattatctgggatatgatgtagttctggatggagaattgatttatgttccttccggaaccgtaccaacattacctgaacctgaaacagacatgcctttttctttatctgctttcatggacgatgatgataacgacattgcgttatttgcggaagaagttcgcaaagtatcgaccccagaagaagaacaggccgaagcaaaacgcgaagaagggaacgggatcgtaaacaaatctctgaaagggacgatcaccgaagaagaacagcgaaacattgtttatgttgtttgggatattattccatatgaggtgtattacggcgaatctgaaagtgttcagacttatgatgagcggtttagcctgttgcgtgatatcctcctggatctttctctgccttctgttcgtttgattcagtctaagctggttaataacattgcagaagcgaagcaggactataacaattaccgcaatgacggtaaagaaggttctattctcaaaaacagaaacttcaaatggaaagattcgcgagtagccgatcaggttaagctgaaaaacaaaaccccgattgaactacggatcattgatatctacgcgcacactaaagaagaccataaggtcggcgggtttgtggtggaagatttatccggaatggctcgaacgaataccggatctgggttaactgataccgattatcgttacgatgatgatggtattacccgtgtatacattccattagatgaacgtggtgaactggatcgcgaatacatcatggcgcataaagatgaatacattggggccattgtagaaatggaagttgacggcctccagaagtcgaaaacgcgtaagaaaggggaaccggaatacagtttcttccttcctattatcaagaagataagacgcgataagaccgaacccgacgatattcatgttgtctttgcagatctattttaataaaaagcccttgactccggtcgggggctttgttatattgggcctatcgaaacgtaaatcactaagagaatatattatgactagtagttatcagaaacacaaaacccttatggcaaacctgtccggtaaacatatcgacgaagtaaaatctctgctgacagtgaccgaaggttcccgattcgaaacaaatcacattatcaaaccttctgtgaagaaagtactgaaagtgatttaccgacatccggtgtatcagtgcgttcatatcatgaacagcaacgcatttattttcgtatataacgaatccgatgataagtgtgttggtattttccgaaaacctaactttgaatgcatgagcgaagcggctgttgcaaccccgatcgttgaagaatatccggattatgttcaacgcaacatgcgttatgtgcaatcccgacttgattatgcatacgatttcaattctgacgcggtagaagcgctggcggatatcctttgcaaaaaccagaaagatcgtcaaatgacaaaatatctgactgatccaacaccgccaacaattcgaatttctgttgaagttccgtttgaaaatcatttcatggcagttgaagcgcttgctaaacttggtttagaagtgaaaacagaagccgtttaatagcactttttgttaaagaagcctcttgcaatgcagggggcttttttgtatagtgtgttcattgaaacgaaacacggagataaacaaaatggctcacatgatgaagaaagcagaattccttaaccttgttaaagattgcggattcgctcacttgaaaacttttcgtggtagtgtttacctctatgaccgcgaaatccaggttgccgaagtctattgcgcttctaacatgcaagaatctggcattatctctgcaatgaaccaatcaatcaaataccgtaaatggatgggctgattatgaaagttaacgtttcttatgaatctcgcgttaatggcgcacagtggcggaagctggataacggacaagtggaaaggcgcttacctggttccgatgagtggacacttgcggcagtgttggaaaccgaaatcgatctggcaacaaaagacggtattttgtttgaggtgaagaaatgatcacactcagtgattatcttctgtttactgctctttgggcggcttcgatattcataactgctttgatttacaataaacgtgatgattttgggttgtgggtattcattcacgggtttcctctttctatgtggatcgtgatgactgctgaaattctccattaatagcactttttgctaaaactatcttgttcttgtttggtatagtgtgttcatcgaaacgaaacagacaaaaggaacatcacatgaacttcatcgatatcaacaaagatttggaaggtaaaaacatcaaactcgttaaccgtgaaatgttagagagtcttggtaacggtggcgaaaaattcagtgaagaattctataacaatttatcgttgatgacggtcaagcgcgttgatgttcagggtggttctggttgggtttctgcaattccggtttcccttgtagatcaagcaacatatgacccagttgctgattcatgggatctggaaatgccgttggtattcgaagaagtcatgaagtgttacgaaatcgcataagggtattattatgaatagcggaaaattacaaatggaagttagcgaagaagaagttaaagagcggttatcggtagcaagaggattccttgaatctatcgaccctgataaacttggaaaatgccctgatacgatttgccttaattgtgggcgttctgttcttgttggtaaatgctgcgataatccaaatatagttgtgatggaaaaggaacaagtatcccccgaaacatgggatcatatccaggaaatcattaaaaaccctccagcgccaactaaaaaattacgtgaattgatgacaaggaaaatgaaatatgagcaaatttaaattgagtgcaaccgttcgccttattcgttggaatggtgaagagatccgttatgatgacccagaattcgcccatgaaattctttcgcatcgtttgggattgaaaaacgcgtcattggttcaaactgttaaaacatcagcagagccggaaatttggcgttgtgttattctggatctcgataacaacattgattatgatgatcctaagaactatccgcttctggaagcacaagttgagaatgctccagaagacagacagtgttttttggttgagttgccacgcgaacattacgaaaacatcataaaggcccgtaaaaaggtcaataacaatgttttcgatctccacctcggattgtttgaggattaagtactgctagttgtgttcgtagtagcggcgctggtaggttcccccacctgtatacattcaagtgtttgcaggtggaaatcttttgatacgtctcgaacacattcaacgatcagatattttcctgcatactcttccccaaatacctcaatgattgcccctaccttaacatctaaacgaccctgctttatatcgaatcggatccggcgttcatagctggataacaattgcattttagacgcctggaaaggtttaccttctgaatctgggttctgaaagttggtatcatagattgcattacggtttgtgaagatccatgtattctctgtgtctgtatcagccagtatatcaccgtacatctttttatcagtcaatgacagactaaagaaactggcgtctttaaacagcgttgtgttatccttatgggtaatgtactgggcttctgtgaatatgacagtatcgccaacaaacacgttatcaacgttaaatttgtatgctgggatcggtgtctgggccagaatgtcagttgaacttttaaggaaaataccggaaccatcttcccacagataacagaaatcagaagaaactacactttgcccgttgtccctgatataatcgaatatatcctgatatgtaccatttagacatccaggagggatacgtatgttaccgccgtcaacttcgggggtaagtagtttcattttgctatacagtgccgtcatacactctgtaatcgtctgtacggcgttgttactaaatgaacgggcaaacttacgtctgaacgttttatgcagcggagagaggttcatacgcagcacagagcggtttttatcgtcagtatctacgttagagtaaagcaatccgtaataatgttgttcctgtgtaccgttatactggaaagatacctgtatgatcggctggataagttgctgatagattaactgtgcgtcgtatatctgcatcagcgtttccgatgagccgttaatcatcgtcttttcactaaacgagacaagagcgggtagcaattcagtatatgcgttatcaatgtatttttcgtatgatgtatataatttaatcgatgtgactcgattgacgattttttcagccataaaaatccctcctaatatatcctatttactaaatagtaaataatgacccaggttcaatttgaggcaataatgaaaaataaaactcttgataaatttatgactacacggcttgaaatcaagaagactaacgttaaaaccgttcatcttccggatggaacagccattgagatccctaagatgtcgtatcgtcattttgtaaagattaagactctgaaagatgacccagttgcgatcatgcgattcatcattgatgacatcaaaccgcgtgaactaacagcagcggaaattgaatttgtgttgatccatatgtatgcacacaataacgctgattatgccaatacgcttaaagaaattgggctaaatcttgatgacctcaaaatctccgaaccttgctatgattttacgtttgacaatgtgcggttagtctttgacaaacccagcctgttaaatgctcaccttccgttcctcatcaaagaggcatatgttgacggtaagccagtagaattaactgaggataaacgagacgaattaattaattgcctgtaccgattcgaatatgatcaggtatcgcgtggtgtcctccaggaagtatacattattcatgaggggaaaaccatcaaagggcttaacatcattggtgaatgataatggctaactcttatttcaacgaagaacaaaagaaaaagtttctgaacagaaacagcaacaaacaaccagcggtcaccaaagtaacagcctcccttgatgctgaaagcgcccgtgacctaaaggaaatcaacgataacacccttgaaagtgcaatcaatactcttgatatcaaagaagggttgaaatcgttcgaagaaaaattccgtgacaaattcgcggggttcaaagaacaatacgaagaggataaaaaggaatcattagccgaacaactacctgatttcgtcggcccgatccgtcctatatccttaaccgatgataactcaaaaactgttgacaatacagtaaacgttaaccaaaatggtcagttcggtaaactggaagaaaacaccgaatctatttttcatgctattaacaaacttgttgatttatatgaaaatactgataagcataagccgcttcctgaaccagtggaagaacctgatccgtatgtagacactaagaaaaaacgcatcaatgatgatgatgacaaaagaagcaaaactctggatagtattgctaaaagtctggtttctattaaaggttttacatcgcagatccttagccgtttcattggttactctctggaagcaatggcaaagtttgctaaatggacgctccttattggttcgttaatctttacattcgatgtgttgcgcgtcacaatacgcaaatggttcgaagatatcctgaaagaaggggaatcctcaaagaaactatttggtacatatctgggtaacgtaaaggctatcgtaacaaagatcgaagaaggtttgaacaacttcaatatgaacaacttaggcgaatcacttcgtgatttgttcgttgagcctatgaagttgttggggcaaactgtacaaacggcaatcactgagggtatcggtcgtcttattcaatcattgggtgaatcaactggcatagacagcattaccaatgccggacgcggaatgcagatcaccgctttacgtgataaacagaaatttggtcttgaattgactaaagaagatattcttatgatcaagaaacaggaactagaagaccaaaaagcggcattagaaaaagaagataaagctattgcagcacgtcatgcattaacaataactccttctcaaattcctaatggttctatctataaagttgctcctactgattatcaagaaagaaatcagaaaaccgtagatgctgataaagaacggcttgataatatgaagaaagcaacggaagaaatgcagaaacaatacgatttagctaaaagcagcgaagaggaagcacaaaaattagccgatgaggaaaacaaacgcaaccgcgcacgtatagaagaagcaaaaaggttagaacaagcgaggaaggaaggaaaacagccgccagaaggtgaagagaaaaagggtgatgatctgttgggtaaagcaaccaactatgctaactctgaaaatctggatgcagccgatatcaaatacattaacgatgaactgttggatcagcttgaaaaacgtcgtaatgaaggcaatctggacgatgtacagaaggatagaatctctgaccttatcgagcaattgcaaaacaagattgcagcccgtacagaatccagcgccccgatcgacgcacagccaccgttagcagcaaataaaccggatgctgataaagcaagcaacattcaggttaacaacaaaactgttaacaacaacgtaactcattcagtacaacgcacagagcataaaccgctcgtagcgctggcataaggaacatataatgaagttttctattattgatgacagtataaacactctcaaaaatattaaaaatcgcggtatcccctctgggggtgccgcaatcacagaatcagtattaaagcaaactatcgttaccgccgaatttccggcccaacgtgcagcaggtatcgataacgcttataatgcttcgagtctgtataataacggccttctgttcactgcatatgattttaatggtgttggtagtaaagacaactatcgttcattacgtcaggcagcacagaacccaaaacaaatactatcatctgcgacgggtaatgttaagtacaaacaagtgttgaatagttctattggtactatggaacctgtttgccagatcctgctaccgcgaagcctgaacgataacgaagtaaacagccaccgctatcaagatgcaaacgatagtttcttaaccaaagggttgagccgtgttgtttcaaacatggtatggggcgctgtagaatccgtttcaggcggtattatggcagaccgaagagaagcccttgatgttggtactaaagccgctttccagggttctgacaagcgaacaaagatgtattacaatacattcgtgattgaaagccgtaatgatttgctggaactgattaaaatctactatctgtttactgttctgggatatggcacaacttctggcggtactgctaaagaggttgctgcattggttaaacagtattacggtgttctgggtgctaaaaccgctaacgcaattagcccttccagtaacccagtaacagcgtcagattttgataatagtctgggtaatgacgtggttgatttcatttcaaacgtagaggttattaaatcgcctcctgtctggtttattcgtgatttccagtctggggattccttgcgtttacctcattcaacctttgggccagcaggtattaccagtgttcgctttggtcgttctattgataatattgtaaatacattaagagaatcaccaaataccccgatctcacttgaggtcgaaattcaatttatggaactgatcgatatgcgtcaggattctatttttgatacaaattactaaggagatatgatgttttacaacgtagatgaatttttatcaggtatggctaatcgcgattttcagcgtagcaacctgtttagcgttgtatttgcaaccagccctgcatcacgtatccttgacaacacgatcggtagtattcgagatactttgattgatggatctattagttctatcaacgcaaacaacccgaacgaattcattaatgctatcactggcggtgtgagtaaattgtttagttacaccgtcgataaggcgattatgtcgctgaacaaaacaggatttagcaaaatcatcggggcaattagcccccgtttgattacttccctgtttggtgatagcatgtatggacaactgctatctgaattccgtgatgaaatgatgtataatatgggtttaagcattatgggagttaacctccctggtaaatccattgggtacgaatacgtttataatggtggcgtacctcaaatcagattcactcgccctgagaatggggaattgtcattgacgttccgcaccgattcagaagcccgtaacctgaaaatctttaacgaatggatttccgctattcgcgatgatgtaacaggacaatacgccttcattgatgaagtgacaagtactattcaggttaacttacacgatcgtgatggttcaccgcatacaacatacgtatttcagaagtgcttgcccgtcaaaatcagtaacagtgaattgagctatgagaacaacaacgaaatctggacatttactgttgattttgcctataaaacatcatgggttgttgaggctgataaagaaggctgggaagggttcaaacaatccgtagaggaaggtttagccattgcagcacgtaccgcaattacaggacaataaaggggctacggccccttttgaggatcttatgtttgatattattcgagtaacattaccatcagggatcaaacgattccctatgtttacagttaaagaccagtttaaattaatgctgacccgtattgatatggaaggtcggccccttaaagagcaacaggaaatactggatgaagtgctggatctgctttatcctgggtattccaaaacagaacaggaatacattttcagccgggtgtattgtggttcgttcggtaaaaacgttatcaaggttgtgataggcggtaaaggtgggggccactccgaagccttcatggtgattaatgatattcaactagaaaatgaatacaagttgaatgatgaaatcacattagggtttaacttcccccgtacacgcaatacaagcgaagagttgtttcttgaatgtatcagttatgtaatatacaacgaacagcgctatgaatggacatcactaaccgaagaaacgaaagagaatattcttgatatcgtcgaacttgatgatgtcgaaaaaatcgttactatgctaacgaaatcggttgatgtgtctatgcgcggtaaatcatttagtggtatgttaaccctgttcaagatattgtttagtcgtggggatctggatgaatttgtgaagaccaactatctgctaaataaaaacggcctgaacctggaacctatcatgaatagtagcccgatggaaaggcaaatttatactgcattgcttgcagaagacttgaaaaaacaaggtgctgttaaatgagaaagcatgaatataaacacgttgagaaatataatgttgattatcgtcctctgacacatacagagtttacccccgacgcagattttatcaaaggggatgtttacctgtatcaaagagaatatcttttcattctggcacttctggaaagtaaaaatattgatacccgtcaactgttcatcaactgtgaagaatgtcaggaaagaatagaattccagcttaaacgcaatcaaatcatggttgaagatttcgacgataagctatacggcaatgacggaatcgcgctatctgttcaccctcgtaagactggtgatgaagagatccccgatcttatcgattacgtaatgatagacggcgaacagatcatgtggagtgattgtagcgacaaagataaagaaatggtgttggatgcaatcgactatgcaacctataaatcgatttctaccgccctggataagccagcagtggtcgcaaacatcccggtaaggtgttcgtgtgggcatagccatatcgtctctctgagaggcttacagcaatttttaaaggtggtctaaatgggtgtaaatctgaggttgctatatagcgatatagaacctaacatgcaacgagattggaataatgacgtagcggcttcaaaaggggccgcagcagtaagaaatagtttgattggtatcgtaaccacgatcaagggtacacgtccatttgatagtaactttggttgtgctattagtgatatgctgtttgagaacatgaaccctctgacagcggaatcaattagaacttctatcgtatctgcgatccggacatatgagcctagagtatataatctttctgttgaagttattccacagtatgatgataactcagtaacagtaaccatctattacagcatcattgatgacccggatgacgtagagcaaatcaaactacagctttccgcatcataacaaaaagccccttcctttcgattggggctttctcttagaattcaatgaatcccattagtgtttgatatcgcaattcaaacggggagatataactttgcatctggttttgatcggatacgatgtaataatacacctcatcattatcatcgtatagtgcttctttgatgatgcaatatcgatcggtttccacgttcacataaagagtatccatgtactttgtaactttggaaccctgtgaactgatctcgtgaatagcgttatctatgaacagtgacaatgcttgcatgaagttatcaaactcaccatattcacagcccataatagaaattgcagtgtattggtgccagcctttgattgtatctccacggcggatccatccgatttgtctacccccgatagatacacaccacactttaccaatagggctatagaaccgcacaacttcttttaataacagggacatgaccccgcattttgtataaggattcattttaacctcatttcatatcaagtagccatgaagggctagtttcaagagaaatcgcagtatattcgtattttacagtataacctttgaaaccgaaaggaatgactgcattttcattgagatattttactttatgctttgcttcttcttcattcagagcagcacagactgttgtttgttcaacgttaccagcaggagaagtaaatttttcaatgataatgtatacgcagttcatcctattgccctctttccattttttcaagtttcagtgtatccacttgtagttgaagtttaagaatacaacctttcgatatgttatacaagtagtcactaacgatttttgactttacctgatcgtaatcagaagataacgtaatccaatcatacatcgtttggtatgatggaagatacgtacattgttcttcttttgataacgctttaaatgattggtaatcggttggaggttccgaagcaattgcggttgtggtcataagactaagtgcaagtagtagatatttcataatgtattcctcattgttttcgatagaaccaatatagcaaaaagccccgaccgaagtcaagggctttttcatcaatgcaagaaagatttcacgtactgttcgatcttttcacgacatgtatcaactgaggtgctttccgcaattacggcatgacataacgcctcgcctccgacccagaaactcatcatgtactgaatatcacgaccttccatttctttttgatgcgctttgattcgatcgaaagcgttttcgattgtttcagtagcagtaagcatttcggattccccgtcaacctccgccagttccccatcgatcatttcgctttcgacttcttcccagtatactatcgttatcatgcattaccccagtggttaaccgtcgtaatccccgccacaattcacatcgccttcaatgaacagttcgcggttatcacgtaataaattatactttctttcgagttcaggcccgaacgcgtcggcgtcttcataccagctataattgtatcttccgcattcatcatcatattctggttcatcgccgcgttcattgaagtgaacaattttgatatcgtccatccccagttctttcaacttatcccagatatacgaaatctcaacgctatgggaaccgaacgcttccagtgagatcgtaccgttgctatcgacttgaggaataccccacttcgaacgagtatcatcggtgatcatatctattaatgactcaatattattctcaccgtagatatcagcaacttccttttctttaccagggcgaacaagtccgatcccgataataaagctactgcttgagctattgctcacaaacccagaacgaattttcatcgcatcaccatattaccaatcatgaatagagggattagcgcaaagacgataccccatagaatgaccttatcttcacgacggtcacacccatgatagataacacctccagcgaaaatcaatacaacaactgaaacgaacgcgaataaagaaatcatttgcgggtatccattctcatagaaacttctttcaggatcttattcagatcgtgaagcgcatcttttacgttaccttcgttataggtaagcatatcctggtacagccctttcaaacaacgattgataacatatgctttttcagaaggtaacattgttccagaacgattataatctcttaaaatgtccatcatcgtgccgttgttaccaggtaatgacgggttgaagttaaccataccggacatcaaactatcaacatacacaactgttgtgttatcagaacgatacgcgccaccaactttaaaccagttgctgaacacatacggagattcccgcacttcgctcaaatcggttccgatttcatcgatgtttacacgaatgttgttaaaatacaccgattcatcaatagaaccatgacgccataagatagcaccattgttatttttgaatccgactacatcaacctgccagccgttatctgttaaccggacatcatcaacgacgatgaaatcaggtagctgtgaatgaaagccgatgttttcaggacgggaattacgaaacccatcacgattggagaaataaaggatgtcgccttgattcagttcgcatatattcataagatttttaaagtccaattcaagtaattccacaagtcacctcaaagccccctttcgggggcaaattcattagagtttgacttctttttcttccagaacgattgtgcaatcaaatttcacatctttccagaattccgctgcaacgatatctgttgcggtaacgcttacgctggtttcttcgaaatccagatccgcaaaccaggcgtgtccgacgacaataccgtacattacacgactcaggcgattattaagggcgcgaacctctttaatagtttcctttgtctgcttatcaagatactcgatcaggtcattcttgtcaagcgcttcgatctctttagatacggtatcgtaagcccacagaatgatcaggtcaccattgttgagtttcttcttaccttcggcgcgttttgcaacggtagccgcaacagccggaagtgatgaaacgcctttgattttcacgttcagttctttcgacatgtaaacatcagtcgattctgtgcgctcaaccttcggagagaagccgtaatcacggatcccttgctcagacaaccattcaccagccgcctcaccaaagcgctgtttaagcccttctgcgttgcgtaaaccaatcgcgttatcacggaagaacttcattaccttctgacggcctttcaggatttccagacggacgttatcagcaacaaattccttaccagaaataccgcgagtcatcgaacggttaaccagaggcagagaggtaaagtcaaccagtacagacatacggtcttcaccaattttcgccagcggtttgatagtcagaccagaagcacgtaagtttttcagagtcggaatatcagtttccagcggcagtactttaacgttcacgataccatctttaacaatggtaaagttacgcacttgtttggtttctactttttccggtaatccaaactctttttgtttgctttccggaatggttacataaccttgtagatccgtattgatggaaatgttcggacgggaactgttacccaccaggtgtttcactgcaactttcgttgtggtttgggtaaattccggtttccatacttcatgcgctaccagttgcgccgccagtgctttacgttcttccggagtagaagcgtttgcaatctgttctgacagtttatccagcgtatcatcatctttctggacagtctgacggcctgtacgattgtacgcccagtgttcagaagacaggtcgatcacggtgtcggtttctgccagcagttcgagagcatcaaccagagtaaacgcattttcatcaggaaccatgttgtaatcaacaccatccatcagacgtttagccggatcaacaaccgcttcggagatcatatctttagcgttggaataatcctgtttggtaaagcagttatcgtatgctttaatcagacgcacatcacccagctttttcagaactttccatgccagatctggattcatggtatgaagcgcatgatacagaaccacatacagaacctgttcaccttctgctgttgccggatcgaagccgtcaacgtcattgatcgcgttttcacccagcgcccaaatgtttttgatatgttccggaaccagaacaacaccatttgcagcattcaggacatacacacggccttcatccaggtagatcgcatgggttgcatcgccaactttgacttcaacacgtgcggaggtttgcgcggtaatgatttcatcaaatgcaggtacatacgcatcaaacccttcaacgaatttgtgtaatgcgttggttgcttccgccattttttccagcagaggacggtttacataataaccatattccaggaaagcaatgttgttaaacgtcaacggcagagtagaacatgctttcaggatgtcatcagtacgccagcagttatcataaccatcagtcaggaagatcagactgttcagattgccattatccgcttgcagatcggtagcgacttcaaccgccagttgcagaggttcaacgaagccagtacatccggtcggacgcagataacgatcgatagcatcattgattttgctcaggtcggatacagagctaaccttttcgcccacgaatacagaaccgaactgaccacggctggagaaatacagaatagatacggtatcatcctgcttaaccagcgttgccaggttgtttttcaggtgctgacgaatgcgcgggagttcgttatacatcgatccggatacgtcacaaacaaaaacgtggttagtcggggttggtttggctacggcgtttttgaattcaatgttagtgatcataattttctcatttataggtaaatttgattaaaatttcgtttacttttttgctaatagtatctaatgcatcatcgcatccaaacttactactcaacaatgaaacaaaatcatccatcgttgttgtttgagactcgccaacgtcaaaagacagagcgtaggcaacaggatttttaatccttacgatttgaatagtatactcattcagatcaaaccgttcaagatattttcgcaaagaaaataaatcaatcggtactggtagagtttgactaaacgttatttcttcccccagttgataggggggcatttttacacagatttcgtattccatcagtgatgactcttcatagtgtgttccagattacggaaaatttgcccgtgttcaagctgggattggaattctccacattcatcagagtaagtaaattcataaatgaatacaccgtcctgattgccaaatttagagttgtactcttcatacaaccacatcttgatcagagcgtctttctcttctgtttccagatcataccagtcacgcccatcataagcaagcgcaatttgaggattagaccgatatcgagtttcggcgctatcttcggtttcccattcataacgcttatcatcatagtatgattcaaagccattccccatatgacctcccaggtcgcggtgtacttgctgtacaacttcttccgctgtcgggcaagtcatccagctataaccacagttaggaacacaatcacccatcatttcgcggagattgttgatatcagtcggatccttcgggaaccggacgatgaaactacttgatgaactattgctcacaaaaccagaacggatcttcattataatttctcccactcaaacgcagtgaaatgttttctttcgttataaccaacagtacaacgatgtgttggctttcctgtgaatccatcaaacacggttacacaatagtaatgcaacgacggaagcggtgtatgtttaatgtatttgatcgcgacgttcaggtcaacagtagaacatacacaatcagacgtttgctcaaaacggtcatcaaaaatcaactcaatgctatagatgttcatctttcacttccttcatgtttttcataacctcttcaaaagttacggggatttcgttgtactgttgcgattcttcatcccatacatcgcgatgcccgaatgttgaactttttgcaatgattttttcattttcccatacatcaatagtaacatgatcaccaagataagggaaattaggaactttgttcagcgcatcaacgcagttttgcaatgattcagaaacatgggcaatttcagtgaattcataatcagcactataagaagctacgtaaatcatcaccaccccctaacgatgctaatcaacagtaaccccaggatccagaacacagcaaccgcacaaatacgggccattactacatttccgcgactagtccactccgcactaaggaacaagagaacaaacgttaacgcgtataaaatcatttcaataacttcggtaatcatataaacctcacgaaaaagcccctttcggggcttgattaatcaatgtccgaacacaccacgaatagactctgcgaatgcatacagttcagggtttttagctttcactgtttcgatttgctccagaatataatctggtttatatttcgcaccgaaccagcagtaagagaaagaacgatcccacatgaacacgttatagtattcaccgttgcgaacttcaaccatcacataaccgggattagaacccagcggataatctttcagaagattgaatttcgcgccagcaccagtacatccgttaaacaggtcattaaaagtcatggtatgttccttttgtcagtttcgtttcaacaaggtcactatactattcttctttagcctatgcaagcgcttttttgatttgttttgcaattgcttcgatcaccggaacagatacagagttacccgcttgtttgtacgcctgtgttttgctcttatgcatcttgaatgaatccggaaatccttgcaaccggaaacactcgcgaggtgataacattcgagggttcttaccttcctgcaataccagacattgaacaccatccttatagtattgggctgttatcgtcccagtacacacagaatccaccataacggcctgataaccaaaccccttgccgtttgccttgtttcgttctttacgctctctaaagcccttccaggcacgatctgatatggtgtattgatcattatccggttcgagaatgtcaccgacccttgttggggtacgtggaggaacaggaaaactaaagaacactggatcgcgaaagcagacaataaacacacgctctcttcgttgaggcaatccaaaatcttttgtattcattacctgataatggatatcgtatccttcgtcctgtaacagcctgtagatggttttaaacgtgtttcccttgtcatgggttaatagctggggaacattctcaaagaacagcacagagggctttttagcccgtataatgcggagtatttcaaagatgatagtaccgcgaggatctaacatgccctgttttaaacctgctttactgaacgcctgacaaggaaacccagctaacaggatatcatgatcaggcacatcattttcatcaatggcgaatatatcaccctgaatattttcatcgccccagttatcagcatatgtttgttgtgcatgtttatcgatttcagacgttaaaaggcattcgaccccgccgaatgccttatcgaaaccgagcctcacgccaccaacaccagcgcaaaggtcaattactttcatacgtcgaaatcaacctcatcgattttgtatgattcttcgccaatatcagcccatagctgaatattcacactttttgcatcacgataaagagattgaccacaaagcccacctgtataacaagtttctgtaatctcgttaacttccaggcgaaggctattgcgcataattttaacaacagccttttccattgccgaatctagggttttagtatcacccaatactacatctttaacgttcaaaataacatcactcattatcgccactccgtttcaattccgtgtttgtatgcgtcaacgcccagaggggtgatcactaaacacatatcagtatttttcgttggcgaactaaacgccatagatgcgtagcctttttgaatcagggcatcacgccctgatttactgggaacatcgttgaaatctaaatccaacatttttgacgagtatccgtaaagtttacacagaacatcaatttcagcgccggataatttcggatatgtcatttgtagtacctcacaacatgttcagaatacacacgttcaatgaaatcattccagaaatcgcgatcaacttctttcggataaccagatacagccgccagcttttcaacttcacacatcgttgattctagcgcctcttgtacggttgcgaaaggaacaccgccagctttaaccattttcaaaaatgcgctgtccggaagaggatacacaatatcaccttctttgaaaatctggatcaattgcataccaccgcgcaacgcatgagaaagagctttccagtcgatcccgttgttggcttctgcttgccgtgcgcgttccccgtattcatcccagagtttatacacggatttcttcatttccgctacggtgatcgtagactggaatttacgccccagaacttcataaaattcctgacaacctgatttcattgttttgtctgtaacgaatcgacaaaactcgttggtcgggaatcggttagaaatctcaccaactttgatgcgcttgccgtaattagattcatccacgttacccagcaatgatgtaccataccagtaatcgggaatcgtctgtaatacatcgacaacttcacgcagtgcagccaggcgagaacctttaacaccatacttcgccgcttgcttacgaacataaccaaacaggccagtgagttccgtagtgtagaagcgtgaacggttagcgcggagatattgccagatatcagagttagcgatcagtttgctatcatctgcatgaagcatatcaatcgccacggtgtcaccatcacatgcgaggctgataaacttttgcagactgtaaatctgacgatctacgtcattaacaccgttctttgagtttttatcgccagttgatgtatcaatagacttcttcgcagtgcctaacaggatttcgcgaggatgagggagatagatccctttgtagtctttatcgcttgttggtgtttccagtccgtacaggtgagaaccgaatacggtttccataatcattttcatcagaattcaacctttaatgtttttgcgatcccgcgcaattcagcggtagtaatatccggaatgtttgttccgtagctattcccaaatacttttttaatcttatcacacaaatcgcggcgatacaccatttctttgtattcttcttcgctacgatacagttgataacccatccacccctcagcccatccggaattgcgcttgattttaatattagtacaacaatcagacccatcttccggtcggaaagatgcatacaggtactgacgcgcaactttttgtacgtaaagggttttggggttgcgattttgtcgctggtcactacggatcccagcatcatacaacgtatcaccaactttcacatcacttaaatcaatcatttacgtctccagcaattagttttttcacagtaatgaacgggaacaggcacacccaacgtttctttactgcttctgttgtatgttatcacaacgaatcggttttcgccacccctaacacactccagatccaaaatctcgcgggttcccttcgtgttaatgtctgcaacataatattcttcgttgttgacaatcactatatccgacataatcaagcgaggtttcatgcagcgtacacctctgattcatcgatccattccagatcctgattgagtgattcaatcagctttttatcgcgtctggaaataacaacggtagaacctttttctgccttcacgatgatatcaccagaagaggtgatgtattcaaccacataatcacggcgagggcttccgagtctatcaccaactttaacagcacgtctaaccgattcatgagatttttcggtgaacactaattcatcacctacgtgggtaacaataccatcaacagcagaacgagaattaacataaattttgctaatctccgccatgaaaacactatctctcagatatcgagcagccactttatctaaacactgagaagatactttatctccgccaggatatactgagataatcattacatgaccctgaacacgggcggttcccactttatgcagaatgtaaaccgtcgaaccatcagaatctttagatacaaggatcacgctgaacgattctttgtgttgcttctgagtttctccgcaggtaaaactcacgtccagaaaatcaccaactttaacagcacggggttttgctacttgttcacgagcactaataacagggatcataatcatttcctcacagtttcaaattcttcatcagatttccaatatacgttaaaattacgacaatcatgttcggatgtcaacgtatatttttcatttgttttctcatcggtgataaccatagtttcattatcgattgagttaacaccataaacgaaaacattctcaccgcgtttgtttaaaaacgcatcacccttttcaatcaactgccaacaggtaacaggcaacccacctggacaaaccggacgggtaacaagacaatagggatgtttcataataagcctcttttgtttctgtaggcccaatatagcaaaagcccctgaccgaagtcaagggctttgttttaaattccggtaaatgcaacgatgatttgataatggtcatcgaagaagtgatcacgcatcatgatcacttcgtgcataggtagccagaacgcgtctgctgcatcatcagagccgcccataatacgaggcaatgaaccatcgttattaggttcgagcttgatatactgtgctacagtcggttttgagaagtacaccgaacgttttggatgatcgaacagcatcgaattacggatagaaccacgaataaccttttcaggtactttaattcgtacttcttccagcaattcacggatcgcacaatcaaggaacgtttcgttaccgtttttgtgtccacccggaagcgctaacgcatctttaccaggtgcaaacttacgacggattactaacacgtggttattacatacgaccaccgagtcagccgtgcaacagttcagagaatccggatacggatattttttgaacttgtcaatctctcgttgccagtgtgcatcttcatgggacaaacgctggaattcttttgtttgtgtccattcatcgataaaggaaaccgtagtgctaggcgcatattttaacaaatcttcgtcccagccttcatggtgttcccagataattttgcgtaaattggtcgaggacagatcctgatctccaaccttcacaggttcaaccggaatatgattccatccgaatgctttaagccagtaagaatctttgtctttttcgtacccgacgatcgcaattcgatcatttcgagtttcatcgattgccatacgaacacgggatttccatttttcctcgttatagaggtaatccggaatgtacgcgaatttgattctggctgcatctccaacatcaagtttacagatagaccaacgagtgatcattgcttgacgctgtttagcggtcaatgggtttagtgtgttcggatatgcataagcagaaccgatcagaatgtaaaccgtatcagcaacagcaagggcttcccttaccattttctcatgaccatagtgaaaaggttgaaaacgtccaattactacagctttatcatatttgtgtttcataacgtgctccacgtttaaaggttaatcataaaacagacgcaattatcaacacaccaaacaatccaccaatgaaaccaaagaatagtgaaatgagtatagtcagtacgatctgttttatgttcattatagtattctcgttttagatgtcaagcccccaaagagggggctttaaaacattatttacgagaatcgaaaatcactttaccagcataatccgaacccattacagtttgaggtacgccacctttatagcgggtagagtagttcatctgtacatccagttctttccagcggatcatttccggcgtaatggtgcgttgcagggcggcgttggcttctgcttctttcttcgctgcatacagacgggcatcagcatcacgttcgttagcgattgcagcgttttcacgcgcctgacgatctgcttccgcttgttttactgcttgtaatgaagtctgttctactttttgcagttcagctttagcagcgttaacctgttcttcgcggatcttcgtgttagttacctgttccatgataacttccggcagggtgatatcctgcaagaatacctgtttcacagtgtaaccgtaaggccgcgcataatcttctacttcctgctgaatcgcaatttgcagttggttttggatcttcgcatcaaacaggtcttgcgcttttggtacggatttaccaaattcgcgaacagtggaaagcagtttttcggttacatacttatccagtgcctgatcctgattacccgcgttgatacggttgatcggtgctttgctaccgtcgaattgcagcattacggtcatatccacagtggatttaaatttatcctgggacggaacctgtaatttgtcgaacttcatcgcgatgtctttggtgctgaacgtatcaaacgttgccagcgggtttacaatgtggaaaccgggcagtacgggtttcggtgatactttacccatgaaggtttcagttttaaccgtaccgtcttgcacaatggtatacatgttaggcactaaccacagtgctgcaactacgcccagagcgatcagagaggttttcttcgggttgttcacgatagtgtttaagttcatcataatttccataagttgttgttcaattcgatagttattctatcatcacatttcacgctgtcaaactatttttaagaaagttttgtcagcttgtagattgtttgatagcacaagcccttaatctcgtccaggatgttcttcaaagaactatctactgattcgtagatctcgtttgcttcgttggctattttacggagatacgctaccgtgtcaagcatattttcggtttttagcacaggtttgtatcttcccgtgattcctatgtggatttcggtgaatttatcaaccaaatcctgcatatcttcgtaaaaaccctcatatgctttatgttgtgagtaggaacctgttgcaaaatgtgcgctatgcatatacgtaacggacataaggcacatgccaataaaggcatctatcttgcttgagttctcagattctgtaatttgtttaaatgattgcatgatgatccctttatgaacgatggatacttgcaaactcatacgcgaccctaattcctagctttgcgcattcggattcagatcggcattgtttttggtgccattttcgttccatgtagttgtagaatagttcgcttgtatttacgctgggagggatcgttgtgatgtatacttgaagggccgcattaatataatcgtcaaattctttctgaaccggacggtcggcggcgtgtgttgtgggtgtcatcatcaacaatccgaacagcacagccattgatatgcgtttaatgttcataacaattactcttttactcatagacccactataggtctactcctgtatatatttatagcaaaaacgaggccgaagcctcgttataatatttttgctgtaaagtcaatcaagtaatgtcataccaacacaaacttctttcgaaagcgcgtattttgttcacgttttctacgttttcatcccaaccgatcacgccagctttcatacgtttcagttcctgacgtaaacgggtacgtacttttgaatcaattttctttactgcaatagaaagcattgcattcagatcgccatgagctttgttaccgtcgcgacacagattattatcaaatcgaatgtatgcacatcctgatttatgtttccagttggtcgagtaccaacgcaacccatcaggatcaataccatgttgagcataataacgagaatactcttttacttcttcgatcttttcgttagatgaacggtcacgaagaggattgtatttcttacggtaagtgcgactcataatgatctccttttgtttatgcttccactgtatcagggttgttctttagttgcaagtaatgttttcgacaaagtgaaacatatttgtcttcggccccgatctcaatctggtcgccattagcaacaaatttgccatttgcatcaatacgggctacggtagttgctttctttccacaatgacaaaccccccgcaactccctgatctcatcagcaagcgccagcaacatataagaaccttcaaacaagttcaactgaaaatcggttcttagtccatatgtcattacgggtatatctaattcgtcaacaacccgacacagatccatgacatttttcctggaaaggaattgcgcttcatccacaaacacgcaagaaaccagtttctcgctatcactgtaaaaatgattgttgtgaacatcataatacaagtccatatcaggcgtgatcatggtgcatgttgcttccaacccaatacgcgaagagatactctgtttaccttctcgcgtatcaattgctggtttgtacatcaggatccgcataccgcgttcctggtagttgtatgcatccgtgagtaaacgagcactcttgccagcattcattgatgcataatgaaaatacagtttagccatttatcctctcaacaaaatctggggtattttggaatttcccttccccttcatggtttttgcatgttttatttgaacagtagatccaccaatcccactcatcataagggggtttggtaatgttcattacacaaattaaagggaaatgacaatcccgacagcgaacattttctataatgtttgcgttagccatgcgtataaccgcccatttcgttatcttgtgcttgatgaatatcaagataccacatattgattttgcttttcagttcgtccatttccttactcagacaattatcaacgatacatagaacattaacagtttctttacgttgcataacatcgatgttattcgctttcatcgcttgcgccaatgcattacaggttttaaccagtgcggcgcgttgtcctttgattacggcgatccgtttgttcgctttcttgatcgcccgacctgctttgataggatccatcatgattaattcgccttacgaggatcgaaatgaacgacaatgatcgggtaatcaccagtcacctcattaataatgcgcttaatgagttcccagtcgcccccagcgagtccagcaccgattaaaggtgtgatgataggctttccagtcttaacggcgtcagcaagccctacagcctgtttaaacgcattaccgattgcatcataatcgacacgcggcccaggtgtccagaaatcatattgagtatatgcattgaaaacaatgttgcctttttcgccaatgtaaacagaacaagttccgagcttatcacgggaaccttttaacgtattggcatcaacttgaaatgcaccaggaatacgatcgcggatttcgcgagcaataccagcgcccatattacaatagcagttgcatccgtggatcaaatggccttcaccattcagatacatattgacagcattacctttcacttctttaatgatcatttttatttttccgatatagtagggccacaacaaggcccatcaaaatcacaaggatccacaatacagtgaattgaacccctacgctcattttctcgctttccgttcgcggcggcggtcttcttgatgacacatatacattacaccagtaaagaccacaaggccaataacaaacccgatgaaattacacatagtcatcatccccgcaataataacaaggcccagtgctctcatgcttaccagcattgtacgccaagaacaccacaaccgccgccataataataaaaatccagatagccattagtaaagccctataccagcattaaattcgtcaaccaaataagtacggaacttttcgcaccgttccttatttggcgcttgtttgcatagattcatcattggttcagactgcaaaaactctttttgtttcagcaacttaccgcgtttatacagatgagcattttcttctccccacatataagcaacatctaactgttctgcgatcacttgcttacatactgcgacatctttgatatcacgattgttgcataactcatccaggcgagcatcacccgcgtgagcaaatccagcaaccagagttaaaagcagtgctaactttttcatgatgattccttattcatcctcttcgataggggtataataatgcgcattgcagatatacgcaagaacttttttcagagacatatccgagaatgtcggatcctgatttcgtctcatcccactaccagtttcaacagcccaacgtttgttagctggattgtatgtcagccagtagcaatcccattcagacagagtatgttcgaacagatcgaaacgcttacgcccatttgcttgcggcctgacaaaaggttcaaccatttctaaagcggttaaaactcgattaaggtttgaaccgtcttcatccatcgcgatccgcaaacagtactggttaatgtccggatccataccatcgatacccaggccgatagattcgaaaaattgtgtcgccgcgtgataaaacacactagaagaacgatattccaacatcacggggatcttttccccatccttgacgttattaatgatatcctgatcgataagttcaatcaggtctcttttatccttgatcaaggtagaaatttcttcttgcagcggggctatctgtgcatgaagttctttgatccgttgatcaattacggtcacttcgaaagctaaatttctcattgtacccattccccgtttttgtcaatgtacatgatccaatcagcaaccgcccaatgggaagtattgcctttcggagtcgctacgatgtaggaaccagctttaaacagtacgcgtttagtttcgttcaggatcaggtcgctcataatgtattcctcatttaaccaaagtgaatcgtgattcataagcatcgttcgggcgctcatacacagtatccgaacttgtaatgacagtatacacggcttctttcacaagatccatgattttctgtgattctccccagacattgatactaaaatacatcccatttttaggaatagggttgtattccatatcataatacatatccatgagttcacaaatgaacaagcggcgctgttcatcatcataagtgaagtaaatgttaaagcaatcaagagatttgctcaaagtaatttctttaatagctatgttatcttgtttgctcaaatgatcacggatcgcttgcacacaacgcaacaggttagggtaatcatatttttgtgaaacaatgacttgatgtgaaacgctcataatgtattcctctcaattagatgcatccataataaaaaagccccagaccgaagtcaagggctttttgtcaaatgatttgtttttcttctaacagcttcgcggttgtattaaccatacgagcataatcacgggcttctttctttgtatacttgaaaccagcgttatagctcgccagcgcctttttcaagtcgcctttgtggtaatcaagccagtactccagttcatagatcgcatacttcgatccaccttgaagagtttcgagctttttgattactacgcgtttaggatatgacttatccattcgtgcgctggcgctccttgcggtaacttgccagcatccataagcgtgatggccttttttacctttaccgacattctcacatgcgcgagactcgatccaggcaatagccgctaaatgatagcctaaacgtttagccttatctttttctacaggttttgcagtcttcaaatcatagttgtgtccaactcgataagcatactccagaacctctttctgcttcggtgtgatgttatccaaatccttgatgtaggatggagaatttttgtttgccggaggctttacagtagccttttgtaaaggcaattgatgagtaggcaaatccgcaatgaaatcccctagcggatccgtcgcagcgttgccagaaaaagagcacaagaaaatgctggcagcaataataattttcttcattttaatacctatgttgcaaaaagaggggcaataatacaccccactttatatttatgcaactattttagatagttttcgcgtcacgtagtttatcagcgataaactcagcaatgttataatttgaaatagccttgttaggatcgtatagtgcagtgatttcatctaacgataccataacggcatgtttaaagtagacgctccagctagtagtaaggatctcgctgttgtcaaatccacagttagggctgaacaacgcgcggtatttgtacccactgtatttcgtcagacgattcgtgctgtgcgcgtcactggtgatcagaaaagttccctggtgagtttccacaacgaaaaagtatccgaggcgttctttgttgtccagcatcttttcaaacttgcgatcggtttcttcgcgaacaatacgagaagtcagcatttccaacactttatcgtattcgggccaatcattctcgatcacgatcgcatcaaatggtttcttaccattaatcccgcgcccgatttcgattttcgtgcaaatttcgttgaacgttttcaaatcttctggcgtcagttctttaagatcgctcaattttgctacataataacgtttttctagtttcattttacggaaacctcaattcaaaaataatttcacagagttaccacatttaggacatgtgataaattttttcacgacataatcagcagcagagaaaaatccattgtaaatcgcttctctcttttgctgtatatcagatagttcatactctaacccacttttacagcaactgcaaacagtaattagttttgggctatggatgacagtaatcatatacacctcacaaaagggggctttcgcccccatcattagaaattgtcttcgacaaacgccgcgagacgggaacgatacactgtatcaagaatgatatggcttgagtgttcgtattctttcagcttttcaacagcccatacaaacccgttgttaacggcagtgtttcgagggttgtcgatctgcttaatgttcccgcatagtatcagaagtgtgttctctccgcaacgagaaatgatagatttaatttcgtggttgctaaggttttgacattcatcaacaatcagcacagaacctttgcccggatccggatgtccgatactgcgaccacggaagtaatacaggctagggaattgaaccacccctttttcaatcaaaccttcaatgtatttttccgattccggattatccttaaacagaatattcaggctagtaatacaaggttcgatagaaggccggagtttttcgcccaatgtaccaggaaggaagccaatttcacttgataacgggctatctgacttcacatacatcaagttagcgtaatgtccactattaaccaggtgcatagcaccggaaacagcaagcattgttttaccagaaccagcgccgcccataatggtagcaacatcgatttcattgctcataatggattcgacaaaagccgcttgcagagaatcacggggctggatagctttcatgagtttgcgtttcatcgcctgttcatgcttaacaggtaagacattcaagcaaatctcatcagcagtcactacacgcccgactaactcaccattagaggtaatgtactggttaggataaaaatcttcgtcaggaagcgaactgtaagtgatttgggctacattatccgtatatcccaacacttctacggtatcccagaaatcagggatctctacataaccggaatacaacacatcgctatcttttaacgtatcgtcgccagtatactgttctaccttacacccacgggacattgcgatcagcaacatcataatatcgcgagtaactaaggttgcatcctgttgcatacaagtttcaatgattcgttcgtcttgcttgtcaagagcaaacgttttgtttccgacataatcaaccactttaagggtaatagtgtcagacagtgctgggtttgtcaggtttaaaggaatacctgatttcgtaatcgcatcatatgactgaccgaaaataacttttgacagaagccggatcgccaatcgtgcttcgtgcgctgttcgttctttcgttttcaggtgatctaattcacccatagtagcagaggtaataatgatttctgtaccaggttgagtgaatgaatagattgaataggggttactaatcaaaacattggtgtctaatacgtattttgacatacattaaccttatgtggtttcgttaaaaaatgcaccgaaaacctcttttgctttccggttataaacggattttgcttcttctggagtgttatagtaccccaaaaattttctttttccatctatgtttatctgcgctttgtacttcccattggctttatgataagaaacacctttcaaccctgtactactgtttgagttacatttctttttcatcgcattttgctggttcgtcgctttctgtaaatttcttgctgtatctccattctcaacaccatatacatgatctacgataggaggaagataaccattctcaacgtaaaacactattcggtgtcgcaaatacatagaacctttaaaatgaatttgggaatactcgtttttgcttccggcttcacttccaggagacatagggccgcgctgaactttccaatacactttacctgtagatgtatcaacatctacaaaattcagaagagattcgatcccttgaatctcttcatgtatggttcttgatgaatagccatgacttttcattacatacccagcgaaattacgtgaatatatgctaatggatgtttcttttgtacacaatgcatgagtgtattatacacaatgtccatgcgttcattgcgcgtaagatcacactcatcaaaaataaggtttattgcctggtgctctattcgacgtccacggaaatgattaagaattgcccctttactggtcaatacatcacatccggtagcaccatttagctgtttggcgtcttgtgctgcatttaacgtatgcgctacgtaaatgttaagggaactatgggaacgtttcataaaatcaaacgcgcctttagtcttttgcgtttctctgcccagatccagcctggtttcgaataccataaaatcgttagggccgtaattatgcgttggttcttccaactctcgcataagatgcatcttacgacattcttcaattgtctttacataaaattcactattcatgttttacctttaaggggccaaagcccctttgttacgctaattccacatgcggggcatcaatgaattttgtttcgatcggaaggttcggatcatttttccagttgataccaaaacgcagtttaacacccagttcatcacctgcttgtttaacagcattcaggacaggcaaccacactttagggtttgtttgccagccttgaggcaacacgctaggatacagatccacagcatcacccgtgatgtgttttgagttcattgtttgagatacacccttacggacgttctcgcgctggtgttccacagtacgcagaccttcacgtacaccaaaatcaacaggagacagttgcagagcacgttctacgactttcaccagttgaggtttaacacctttaaggttgttaaggcttttttgactgaatttaaacataaatcacctcttgtaaaaataccctgtttgggtacacagggtatttatggtttaagaggttcgataattaataatcgtaaagatcaccgaagcataattcaaattcacgtttacgtttcatctgttcttcttttctctctttcatatcagaagggagacgatcttcattgacttcatcaatgtacgcctgtgcatcctcttttgttagaaagaatgcatggaagttatatccgttacgcccattcatactacggtcgtcaagagagaattgagtgtgacagtcccagtcatcaaacagggtgatgcattttgcaaacagcccgataccgcgattcatataagggaagccagtaacaatcatctttctacccatttccgccttttcgccgtccacgcagaatacttcatacatgatcgcacccggtttaacatctttcttaacagcacgtttttcaaaagcacttttcataatatattcctctcaattggtgtaactacagactactagtttattttctggatgtcaacaaggtttatcgttttttgacggaaaagttagagtgaataaacgatcgtgaaggttgtcgatccgttcacaagcctgtttcagtatggttttatcaccatcatttgttgtttcaatgcatccaagttcatcggcgtcaatgttcactacatcgctcatcaatgaagcaaacacgttagcatcaggatgtaacagttcttcgatttcggccttcatgccgtcgtgttcagaaaggatatcaataatatcgcgggttaaatctccctggtacgggaaccctgtttctaaatgattaatgatcctttgtgctttcgtaatcatatttttacctacaaaaaagcccctttcggggctagttaattagagttcacagcaacggcacacaccgtattttgtaaatggagcatcaccgctaacgtaggcccagaaatcacatgcttcttcggcagtatcgaagattgcggcatcatagaacccgtgggcttcgttaccgttctcatcgatgaaaaccggagtccagatattaggattgaagcaatcgtcaacaacaacccaaccttctttagctttcattgcttctttgttggcttcgatgtgagctaagatttcgttcatgatgtccatttttctctcctaaagtgtgtttcgtttcgacagggctatagtctcataaccccgtatctacgtcaacacttatttgaagcgaattgtactatttttgaaaaatagtccagagcacacagcaccttcaattttcacccctgtagggcttttagcaacgaaccctgttgcgtaggtgtctttctcatcacatgcgaaccaggcgtggcctgtgtacgtgatatcgctaaacccgttagcagtcagaatacgttcggcttctttctcatcggtgcatccggattgtgctaaaacgacaataacgactaacaccaaagcaataatatatttcatgttaaactctttttaagttggttttactggcttcaatccagtacacgggatcagaatagttaccgcacatacccagtaacacagttgtacatcctaaatgatcggaaggtctcaatccatcaggatgaaaaggcaattcgttaacaccaatactggtagcaaaaagagcacctccagtactgtaaaatgttttgatatgatcgtatgcatcatcaggccactgaaaacgataagttttattgtcaatggttactgtatacatatcatattccgtaaacaacggatcttttccttgtgttgccccatacagagcgccgcgccattcaaccagatttgcttcaatgtcgcttacacaaatttcgttacccatacgcaaatcatgaaggatcccttcaatggtacgaatagccccactaagttcattagttaacatagagtttcctttaaatcggtttaatggttttcaggtgtagtttagcataaaaagaaccaaatgagttaccattatgatcaaatttatagttttcactcttccagtatttccccgatttcatcaggggaacacgcttcttacctgctgttatcgtttcaaccattccggtatgagtaaatgtcatgatataccctcttctttcagcacttcccagatcagtttatcaaggtgcatcaggttccacataaccgaatcataagaacccagtgagcgggagtaaatcactccccatgaacgataacttttctggaatgcttctgcactatctacatcatacggcatatcatcaccggatgcaatcaaaagtttaaggatcatcagactgttcagaagttttgaactagcgtcttgtgcttgtacttttgcacaataattttcaataatcgcttttgcctttggttcggtgatgcgtccatttttgcatcgctctttgtacacatacataagttcatcgattatttcttgcatacattctttccttctgttctgtgctcatgccatacaactgagagcgtatacggtcttgtatgtggcgtgtttcgttttgcatcagttggtttgaaagaatcaaatcgactaccgcgccgcgaactttccatagataatcaatcattgccatatcttcatcagtatggaaacccttagcatcacattcatagataatgctttgcctttccgccattgccatttctgctgttgccggagtagccagagaatattcatacttctcgatcaacgattccagtgtacgctgtttttcgggaatgtcaatcattaaaggattaaatttcatttcaattccaccgcgtacacatccaattcaggggctttgtgtacgcgcatatctttaccacatacagcataagccggacagttacggcaaccgttatgatccttgttaccaaccaattcctgacggaatttcttagttttcggatgttcccagatatctttgataaagtcactggcttccaggacgttaagcccttctgaccatccaccctcgacccaacgttcggtaaaggaacaagggaagaattcacccttctcgttgatgtacgagctaaacatagtagcttcgcaatcttccgcatactgtttgtactgttcaaaattttcatgcccttccatagcctctacaaaggccggagcggaacaagaatcaaaaccgaaccctacaccagattcaaggcaatactctaccagcgctttatactgctcgcgtgtaacggtatcccagttcttcccacggcctttttgttttagacccaggaatacgatcgcgttaacttgtttcaagcgcggatcattcttcacagcatcaaccacgttaaacgcatcatcataggttttagagctaaccatgaaatgaagattgatttgctgttgtccggcttccgccaggttagccactgaattaaatgcgacatcgaatccagcatgtttatatactgataccgcaacagccccagcaacagccgctaaacgcgctgcaacgtcttttgatacgtcagcaatggtaaggttcggcacaatacctttagaacgcgcataggccatcatatcaaacatatcagggtttgtttgtccctgtgcatcagcaccgagggcgcattgtgttaaccagggcattttatcaatgatagatttgaatgtatcaagatccatattgaagccgttagggttattagacttgtagcagaaaccgcaaagtttaccagcggggccattgcatttggtagtgatctcgatatctaggataaaaggaaaatgactataaataggatcgtcagcaggagttttgccccaggtcatcatatgacctgttttcatatcaaaattaaaattaacttcttcggaacgatagattttctttcctttcgcttccagtagaagacccacaggcgttttgatatgtttggcgtttactttaacgtgtctcataggaacctcataatgtattacgtttatagaatcacaaatgttgtagagaacaagcactattatggttcaagaaaacccaaaaagtcaatgcttgcttccgacgatttagggaaacactatttcagcagttcccgtgatagtcatttcatccaggatcagaaggaaaatccaggacactacaaatataaaataatcgtatctgggttgtcaagggaaaaagcgatgaaacttgagaaaaggttacacgaaatctacaaggtggacaagaacccacatttttataacaaacacatacacaacagcattgatttttcatgtacgccagaaacaggaaagaagatttctcaaacacatcagaaatacgcagcaaagaaaatctcagaatcccataaaaggcgattcaaggaaggtattgcatcacacaaaggagagaacaacccacgatacaacgaccatcggtcttatgaagagatacacggagaggaaagagcggaagctatacgtaaagcgcaatctgaatcaagaagtggaaaaggcaattcccgcgcggttatgtggaaatttacttcccctactggagaagaatttttagttgaaggagaatgtaaaaagttttgcaaagacagaaatatttccatgcgcaaactgaaaacatatttgggtgaagtcatcacaacatgtgataaaccctacgatatatctaagaataccgtaggatggaaattagaaaagattatttgaatcttcttttacgttcgtcagccagttcttttttgtacgttttaacgtacttcccgttaagggtacgaagttgttggaaaaccttgttacacaaagcacgtttcgctttgtattccggcgttacacggattgattcgatcgtcatccccatttcgtttttaggatatgcgctcaactcagcgccgatctctctgtaccagttgcttaactgatcacgctgtgctttgtactcttcaaaagttaacattataactgatctccgtaatcttttgctgcatcttcgggggttgcgtccagtcggtaaagctcaacggctaacggactgggtttgatttcgcggttcaggatctcactgataccgcgaaggaattctatataaggacggaatctcattttatacgtaccgcgttaaaagcctggttccggagatcatacgctttttcaagctgttctgtagtgaacagagaactatcagagtttactgtgaaactgcaaatggttttgttgtcggcgtttacttcttcaacaacgatttcataaccccagatcccgctgtactcacatttcacgttccggtacttgatgtaaactgctgcaacatcttcttttttgtagttccggcttttgtagataatttccatgatatcctccttcgtttcgatgtgtgtacaataacagattggggttatagagttttagcaattcgtgctaattatgccattttcttagcgattttccaggcggctttgaatgccggaacatcttcaatatcaacccagaaaccagcaccaaaaccatcatcgtagcaagggcaaccgtcgcagtaattttcccaggtcatcacttcaccaccaacagaagcaccagtttccatagcgcgtaacgcatcttcaactttttccagtttttctgcgttgttgtcataaatgatgaagtaccattttccgttgtattcgttacccagtttgattgcttcgcgaacaagtttcatgatgatttcctttttgtctgtttcgtttctatgtgtgtaatataacaaaacccctaaccataggcaaggggtttttgcaaaaattatcgtttgatcggggtattatctataacccgttgaatttccgaacgcatcgtagaatactggcacaattcggtaagcgcccgatccaggtgcatcatagcgtaagaaaactcttttccgcatttgtcgcatctagcgtataaatgtaaatgaattcgcccgatcccatctacctgactatatttctggaatatgtaaggatctgcacctcgatagccagtagcttcgtgcttacactctcgtttgaaccatgacattaataatatccttgtacgttgaagcgatcacataacaattttcttgtttggttagtatcgctttggatagaatgcaacatagcgctgatcatgtttaggttattttgcatcatttccgcgctcatgagaacttccatacgcgcacgtaagcgtttattttcttcttccaactcaaccatacggtcatatgctttgatgcgctctaagggcatatcaggacgctctttgagtacgcgagcacgttcaacctcacaagcatgatttgctttccagtggttcgattccgcttcaaatttattaaggcggcggatctcttcaaccagctttttgatcatgtgtggatccatcatgtcgatgaatttcatcaagcaattggattttgtttggttgtcagcaacagaccaagacgaattatacgtaaccgtaaacgtgcggcccatttcatcaacaaccccgatcttgttatcatcggtgattgtagccgcccatttatcccgcatggctgtacaggttccactggcgacactatgcaacttgtttaatgttgcgtcatcaaacacaatttcatcactcatgtatgcctcacatagatttcaaaatacgcagaagtgcgttagtaaagatatcaggaacacaaccaccaaacaacttatgattcatcagcgctaatttcatgctgtgattttcagtatatcgcccgttatggatcccccaggcaacgacattaccaggttcatgaataactaagttagtgagagtaacggtcatgcgctctttatcattgatagagaatgaatagcagtaaccggatccgatgtcgccgtaaaggttaaggtctttcaatttcccttgctcatgcaagcgtttcatatgaactgcacatgcatgattaatagtcatttcgtcatccctagcccagtcatcaataccagaggtataacgaatattgaaatagttagtcagttcatttgatacgctcattagaaacctcacttttataaaattctttaccagacccattacagctactgcatttgggggaacggttgttatcataccgccctgatccattacatgcaacacatttccgtaatttccagccatacacgaaccgcatgtaataatcggttcgtgcggccttgcgttcgtggaaattcatactttgtaaacctgaaccaaccacatttcgatgttaggcgcgtaagtaacgtttaccttatgcatagtgcggtatttgtaagcggctttgtacgcatcgagttcagtcggaacacagaaagagaaaccgttatcatagcgttctgcgttagaaacttcacaaccaactacagcggcaatgtttttattcatgttcatgatattttcctttctctgtttcgtttcgatgtgtgtaatataacaaagcccctgcactaatgcaagggctttttgattattttggtaatttttcgattgttgctttcaactcattgattttattaaagagttcatcgctatatttcatcaactcactacggcgtttttcggcccacttgatcaggaattcaggagaatctacaccatacgtgtaaccttctgcactcagttgaatacgagcacgggaaccataatcaacagaactttgttcaatgagaaacttgaccgcatcaagcagggctaaatcttcatgacttaccatgattccttctgcctttggaagatccacaacttcatcctgaatgagttcacggcgggttgtttcttccagtgtttcatgattctggatcatcgtttcgaccggatcctttgccacggctggtttgttttcacctacttcttccaaaaacatcaacatccatccaggaattttagtccggaaagaactttgtacttcactggtgcatgaatttcccagaatgtggatcgcgttaccatgcatatcagctttattgatatagataacgttctgctgttcctgtcggttgctaccataagaaaggaagcggcgtaacgatgtgttatgaccatacttccctaaatcgatttcagccaggcaatcaatgatcccacggttagaaaccttgtaacgtttaccctgtttgaaaaataacgattcttccaggtgagtaggggtaaactcttcataaagaacatagaattctttaggaattttgcgctgaaccagactcagtttacaattattagaaggaacaataacagagtgaatgtttccttcggtatcacacatagcttgcattacttgcggatagtaaagatggtctttcttgcaagtatagctatggatacgactctgacgttttttgaagtaccatttaccagtttcaaaaggcgctgttgtaaaattcattttgcattctcatacatagttaaaattgcttgcatatgttccggtgattgtggaacccctgcaaagttcactttcaaaaagaaattcaaccgatcttttatgttgcactcatcgagcccaagcgctggcaatgaaatgttttcaaaagcacgttgttcatgtctttccatttcaccccaaaacaaacgggaaccgttaggcatcggtattccaatttcgttgttccagaatttcatgatagttgtcaagcgttgttttccatcaatgacttctacccatcgagattcgttgaattcactatcaaccgcgatcgcaatgataccgcaaggaaacccagtaatcaaagtcttcatgaaagcatcttgctctttctgcttccacacgtagggccgctgataggacggattcagatccagatcgttgttcttgaaccaatgaatgtaactaccaaccatgatcgcatgatcgcgactttggaaagtttttaactcactaatacggtttcttacaatttcatccgacattataaaatcaccatccagtatataatcgtaatcataaccgctacggtgaaacatattgcagcgtacacccgcgcattatgaacctgtgttttcaattccgcgatctcttgatccttttcgctttcaaactcttcgcgagtaccataatacccaggatcgttagcagttgccaatctaaccgcatctttttcaaccagcgttgcataaccgctttttatttgtgtcgccccgtaccatccaccccgatcgttgttaatgatcaggtgatcgcctttttcgttatgctttgattcgccaacgacaataaccctcttaccattcataatatgatcctcaaaggggccgaagcccctattttgcgttcttctgtagataatctaacatattcccgctttgatgtaaatccaaaactttagaaaacttctctgcgtttctttcgtttgtgaattcgtcgaaatgccatacaccatcatcagctattaacgcgccaggtgatgaacctgtttctacatcacgggaaagcgcaagccccagagggtgtaagatttcgcggttaatgcgccaaacaaggcccatttcagatagagtattaaaatcgacgtatttcatattatacctttggtttaacaccgtaggccaacataccgaaacggtgatcgttgtctgcatctttaaacagaacttcgttaccatcaatgcagagaacctttgcttccggatcgatgtatggaagcaaccataaagggatcaggcgtaggccgctatgttcatcccaacgactgaaattgagttcttccagttcatcaagggaaagctcattaggatcgatataacggaaccatttggtatttttgaggcggtcggggaagtttacaatttcttcatagccgaattcagcactccatgaagagtaaacagtgacttcggatgctttggttaaaacagcatcgcgaattgatttgcagatatcgattaaagtcagttgattttccatgatatatttctcatcttgctaaaattttaggcagtagttgccccatcgttttacgtgcatgtgacggaatctgtgagatcgggacatatttaaaatcatccatttcacgtatagtccgtccgttcttaacgaaagttgatgcacaatagcattcttccgctactgggtaatcttgccctacatagaggaataaagcaaggttttttgttttcgtgtaatcgagaacacccaggctaaccaattcctccgcgaacacttcaaatcctgtttcttcgaagcattcgcggatcgccgcgtcaatatgagtttcgcccttttcaacatgccccttcggaatatcccaatggggcgtttcggtggcatggcccatcaacacggcaccatctttaataaagataatacccgctgatagttccatttattcacctgcaaaagcgttatcaaatgctttaagtgcgttgttagcgcgagcactggcttttgtcacaccagcagaaaggttttcgaagaaagtatgtttccacacttcacgacgactggattcatgctccagactgtttttgtgatcaccgcgaatctgttcttccatgtcataacggtacagatcgagttctgcgtttaatttctgttctaatgcctgtgcaaatacatgttcaatattcattttgtatagcctatttcagatttaaggttttcgagggtggagtgataaacaacattcccttcgtgtcgagtataccatacttttccgttctggttacactcattcattacattttcatctaaaccagggatcggcttcatgctgggagaaaacgcgatagacatcatttgttctgcactatcagcaaacccacaagggaaaacaaatccagttggtttatcaagatacatcaactctactttagccatagatttcttcgaaatcctcacaatcaggcaaatacgtttcacagaaggtgcaaagcgtaaagaatgcaggttgacgaataccaggattatccggtagatacatccagaaggtgttagcaaacacgatgaatgttttcaggttttcggtggtaatttcgctaacaccatcatacccggattgattgatcgcgcgttgcagcggcacctcatactgttcgcaatagtcggcataatgatcgcttgttaccaggctattagccattttaatcaaatcaacgattttcatgattttacatattccactttaacaggttttgcaacaaatttatctttggtgcgcccatgaccattacacaggtcacattctttgttgaaatctttcatatcttcgacccatccagaatctggcaacccagacggatatgcgttataacgaatggtttcataaccttttccgttgcatttcgggcaaacatgaggacgttcctttttagcagactctgccagttcgcgaagggtagtagaactaccataagcccgacacatgttttcaaagtcttttaaagtcatgttataaacatcgatgacgttatattttttgccggatggtttagccataatatatttctcacttaaagatttttttgatgaaagagatagcaaggccgataccaaagaaaatcaagtaaccttttccgtcaccgtgcgccaaaacatagagtgagctgccgtatgcgatgagttctgcgatgttcattaagtttctcatgatatcctcctttttctatattaagtatcttaccataatataaaccaaagtcaacaacaaagttttatcaacccacttatcaccagtcattagtaatcccctacaggttgagacgccgcaacactcaggatcttgaaagtgcaattgttccattcacaataagtttttgcgcaatgaacacttcctttcataacaaacccgtttgagaaaattaaccagtaaagtttcatgatagcctcctttgtttcgacaaggccaatataacaaagcccctgcacgaatgcaagggcttttttcagtttttcaacatccaaagttgcggaggacaatctttagaagcgattagacgatccaggcgggacataacccgacgataaccgtcgtattcaaaattaatttttggtggaacgtagttgacctggattgtttttctgttagctaaagaaacatactcagggatcaccgttcgcaaccgtatagcgatcactggcttctcttcgccttcgttaaagaacatttgaacagttataggacaagcaaagattttaccatttacccgacgataaacaataacttcctgtgtcccttctgttttggccttcaccgcgtaggttagaacataacacgaataatgatttgctagactcatcatgatatcgcgataagtttcaatatcttttttaatcgatactgaacggtctttaaagcgatctgcaatgtggtcagcagtagccgctaccttgattgtataccagtcacctaacgcgctagtaaacgcctcgctaacttcttttcgtacactgttaacaagatacattaaacgtgttctgttcatataatcctcactgatttttgaagtattcgatctgacgcaaacgcttttcagcggcggctttcgaatcgtattcaccaagttcttttgtgcgatcgtgattcaaaacaacccacttatcgccacgctgttcaatgtgttctgtaatatcttttaacgacttatccagatccagtgattcagcctcttcacagataatagtcaaatccacgggcagtgtcaacaaccttttcactccgctgatatcatcaagcatcgaatcgtatgcaagggttacgtgcggtttgtaatccggataatcgtatgttgcgccagcatcaatagaatctttgaaacggctatgcaggtattcagattccaggatccctacgatagtgctaccgtattttgtgtcccacttttcaacatcaaccagtttagcaggttctgtgatgtcctgttgcgggaacaaatcaaccgttttccggctgtatacgatcgttgtatgcatcttttcggctgaaacagcattctttgtgatacctaatgtcttttgaacatttttcaaagcctcacatgaagcctgatcgaatttagcacacatgtagataccaggatctacaacaggttttgtgatttcaagaaatgatttcataaaacaccccaataaaaaaggggccgaagcccctttgtaataaatttgtttttacgcttcttcgccaaaggcggcttcatcttccgcgcctttttcgacttcaacggaagggatcagagcggataccgcgccaatcactgcttctggggttactggctggcttgcgtcaatacccagtaccgaacacaggtcggacagaagttgacgatgaaccgacagttcactttctttttgcgcgataacttcgttaagatcgaatgcgcggcctttcagtaccagtacttcattttgcagtttttgaatatcagacattttattacccattgttaaaatttaaaagtatcgagcactttgctctttagttgtttcaaagtaccttcgttagtgatgatactatctccaggttgaggtgtcaaacctttttccgtggaatgttcatcaacaattccggtatcctttacaataaacacaaacttagcacccaagcgtttcaggtatttatattcgtgttcctgacgacagtcagttaccagaagatgattgtattcgtcaccagcatatttattgacgaatctttccagtgtgtaacgaacccaaaccgtgttatcatacttgcatacgatatcagttccaaacacttgcatcaagcgtctgatactccagggagtatcgttactcataatcagattatcaatatcatcaggactataaacaatattgtatccacgttctttgaggatttcaagcccgattttgaaaatatttagaacatcttcattagacatcacaagaggtttctctcgatcaccttcgtaaaaaatagcatccggatcagaatattttccttcaaccagactacgaatgtatggtttagcgtaaccatatcgctgcattgctactcttagcgttcttttgataccaaatgccagtgcttcacactgaacatcattgtacgcctcttgaataaatttagcaaccgtatctttaccagttcgcttttttccactaatcacataaatcattagctcattctcttttgagaagtgactacttttccgtcaatttcaacttccatatgaaggaagccaaaagttgccatacacgtaaccgcttcatcactatcgttagtataacccaattcaacctcacccaagtttgttgggaaggcaccataaaatctaaatgtggcgatcgttttcatctgggagttatccaggatatgcacagcgaatgattgcttaggatcatcccacgcaacagagttaaactcgttgtaatcgtttgtgctcaacatccatatgtaaatcccaagatacgatctcatttcctcatcgactacaaagcggatcatcaaaggatcaaactcaaaagccgaaccaggtactttacctcgaaccatcatatttgcaggaatatcaactgctgggaggttcattgatggtagtgtaaccccttgaacttgtaaagtcaaacctttcatgtaactgttatcaggaatatcaacccgaaagtttgtaggtgagatttggtttaaaatcatttctgtagacataggatctcctttcctctatttagcggggaacgggatcaaagcggcctgacggggtaatataaaaatttgaagaaaatgcttgaccttttaaaatctttgatctataataattattaattaaaattttatcaaaaagatctaacaagatcaagtaaaatttaataaataatttattaaaaaattttagatctgatcttgaattcataaattttatgatctataatatattaatattttattttatcataaatttttatgaagatcaatacttagatctaataaattttatgctttttctgaaaacttttcctttaccccgtcactaaatactggtactatgttcccatattggaaatcaggaaaaacaaaatgactcacttgaaaaaattcaaagaatttctgaccgaaggtaaaaccctcgctcgtaccgtagcacgtggtcaacgcgctaaaacttccgataaacattcaatcggttttcttcacttcaaacatggttctgatttcgaagttttagcaccggattctcacgatctggcatacttcggtaaaaacattgtacgtttgaaaggtatgactactggtaaagttcaagcggcttatgtcgattgggctaaaggtactgtttctttctacagtggcaatccggatgatgatctggatttcgacaaaccagaaaaattcaaagctgctactctgtatgaagaggcggaagaaaatctggatctgtataaccagttagcagaagatttcgaaatcgagatccctatggatgaagctctggtgaaaggtaaagtttacaaactcccaagcaacgatatgcgtcttctgtacactgggcgttctaaaactaaagcaagcggtgaatatgcagtgtttaccgtagttgatgcttccggcaaacctcgcctagtatctggtaaaaaattcacccaggaatataaaggcgatatggtttctaaactggttctggctgaatccgaagatctgaatgaagcggctaaaggcattcgcgaaaaagttattgctgtgatggtgaaacgcgggtttaacgaaaaagatgcagaaaagatggttgacaaaaacctgaaagatgctatgaaagttagacctggtgcgacccctggaaaacttgcagaaatagttagcaccctgtaaaaataaagccccttccttccggttggggctttttgattagtatttgctccagacttttttcgcgccgtaaggtttccctttggacataaattgttgagtcggtagccaaacagctttcgcccaatccttcggggcaatctctgctaatggtgatttgaggtgtgatggtagatatgctttgatcatttctgttgcgcctcgcatacctttcacgttaccccagttaattttgagtacagtcttgttagagaggcgtttagtggatccgtaccctcgcttcaataactcttctaaaaactcctgtcgtgctctgggtggcgcatagtgcaagttcaaaccatagaacactaagttacccgctttcgatcttccggatcctaagaaaataatcagtggaaatctatcccaatacggcagggtgtctttatattttgcatcatatgcaaacgtgtacaggcgacccgttgctggttttgccacacggtgtgttttgatactggttttgatgaaattaccaaaccattctgttgaatctttctgtcgctttgccgctgatacaccaacagtgatctttttcagactattacggaaatcgttgatgatctcgatcccgtgttttttacggtagtcattacgttttttacgggcttctgtctctgcggaacgtcgttcaatctcatcatcaatctgttttttgtaacgatgcattgactttgtgaacgttgcgtagtttaatccctcagaatcggcaaaacgtttagcagaaacacctttcgtttttgccttacggaatttgatccccagttcaacccaatcactcaatttgcgtttgggtggtgctttgggtttatcctcttccgcgatgatctcaaactcaaaaataaaactcatgtttccctccagggattactgacctcgccacccaaaaacttttttgagtgattcttctgttacgattttgaactgccagcctttttgacggcatagctcatttgcggctttccacttatcaatattaactgtataggtgtaaagagcatcaataaatttctttttattgtgtacgttgttgtttactggcttcggtggaggcatggtttctttaaggggcttaacctcccaaagatatgtagtaccattttccatttccacatagaaatccatgtaatagcgtcttctcttaccgtctgcattgcagaaatacgggatcactatacattcagaattccaacgttttacgtgtgggtttttatccagccacttcataacgtagcgctcccacgatgacctatacgtaatctttcgcggatcgcctttatacttctgtatgttttcgggtacaaacgaccctttatacgtctgtcttccagccattgcgtaaatcctaaatagaataatataacgtttagataggggaacttatcgtgctattttcatacttcccgcctgttgattacaaaggcacccagacaactgatattttccgagactatcgattttattttaatcgtgtgattggaaaatataaaacccgtagttaccagataacaggcacactacgacctgaacaacttgcagaatcattatatggaaaccagcaatactactggatcctgttgatgcttaactctgtttatgaccctttctatggttggatctccgatcaggaagccgcgtatcagtgcgctatacagcgttattctgaggttggcggtgaacaggttctgtatcacgtagatgaaaacaacaacaagtattataaccttgtcgaagaccccaataaccctggtcattggtatgacaaaggtgacaaaccaatgctgtatttacagtatcaaggtgtattagctcctgtagatatttatgaagatgcagtgttgcaaaatgaagcaaaacgaacaataaaaatcattagtccgtctgacatccaggcgtttctgaatgattttattaaagaaatggaaaaggctaactcatgaaattaggcggaaatttacactcccctttctttgatggggtggttgaaaacgttgatgatccgcgcgggttgggccgtgttcaagtccgtgtatttggacaacacccagcccaaaaacaaaaatccgatgcaatcggtgttcctgttgaagatttaccctggatgatgcctattcaggatattagaagcgctgcgatctctggtgtgggcttctctccaactggtatcactcgcggatcctttgttgttggttattggcgtgacaaatggcaccaagatggtatgataatcggtactgtcgctggtgaatatgtcgaacaaccagacacacagaaaggtttttgcgatcctatgggtgaataccctcgctatgttggtaacgatgttaactcccttgcattaggtggtttgaaaggcaaaggatcatcaagtgtcatcattcgtgattcaaacacaagcatagcagtaaacccagacgatcgcccactggatgagataccagaagataaccgccctgatacgggtggatttacgatcgaaaagatgctcaagcaggatgaggggatccgcacacgatggtatacagacagtgaaggatatccgacaatcgggatcgggcatttgcttatccgcgaaaagactcgcgacactgcaaaaattaacgctgcgatcagtaaagcggtaggtcgagaagtaacaaacgggacaatcacggcagaagaggtatcaaccttatttgctcaagatttagccaaagtaagatctgatattcagagaaccgctaacgtccgtgaagtgtatgtgaacctaaaccgtcctcgtcaaatggcgatcgaaaacatgtcgtttcaaatgggcgtcggtggtgttgctaaattcaccaataccctaaaagcgatgaaaaatgaagattggcaagcggcttataatggtcttcgcaattcactgtgggctagtcaaactccaggccgttcttctcgcgtgtctaaaatcgtcctcacgggcaaccttgaatcatatggggtgcaagtaccagatccggaagggcgctctctgagtgctgcttacgctgcgtataacggtgctacattgtcggctactagtccggaagatccgtttactcctggtgatacccgtgtgatgtttgaagaaccagcatcatcttataatgcggaatatccgtataacatggtgtttgaatcgagatccggacacattcaggaattcgatgataccccaggatacgaacgatataaccgtgttcacccagcagggagttacgaagaaattcgcccggatggaacccgcgttgttaaaatcgtaggggatgattatcagatcgtgatgcagggccggaaactcaacgttaaaggcaacttacaggtagttattgaaggcgatgcgttcatttacaacatgggtaacgttcaacaaacggttgatggtaacgtaactgaatttgttcgtggaaacgttcaacaaacggttgaaggtgagtacgttggcctgattaaaggcaatgctgaactaactgtaaacaaagatgcaacagttaacgttgatcagaatcttaccgcaaatgtgaaacagaatgcaaccgttgctgtaacagaagacgcaacggtcactgcaaaaaatgcgaaaattgagattgaagaaacgatggatatcggtgctaaagatatcaatatcaaagcaacgaataacacgtttattgattctggcgcattaacaaaaatcactggcggcacagtacaggtaggctaacatgattatggattatgaatcaataattgatggaattatgcaaaattatcagcatccttgtgatgctgagatccccgctggctattatcggcgggttatctggcaagggcatacagaaaattatccggctgttggggttgagtgggataccgagataatcaaaatcggtactcatctttatactcaagaaccattcggacatagaagcacggatctacctgttgtcaattcaccaggaacagatccaaataccggacaatcaacagggatccttgttccaaagattggctattatttcaacactcaagcagaaattgatgcttacattacatctattggtgcaactaaaatcaatggtggtaatgattggtatggcgcggatctgtcaaaatcaaacctatacaaaaaccctggcgaactggctatgtataaggtcgaaaacagtggtgggtatctttccggaacaaaccctgtatgtgatgctcgcatacgtcagacgtataatcaggacactggcgcattcaccaatattgattattattggaatggtaatcgtatagcctatatgaagcatgatgaaacaggggcgcatcaatgcaaatatacgggtatgcaggttaacaccaacgcagatacaagcattcctcctgttcctcctgcaatgccttccacttatggggcattaccgagtgaattaagccgtgctgatatttcgtgcattccggcaactgttggtttcgcatatacaaatatcagtgatgctatgttacaggcatggaacgaaacccgtaatacgttcaagctacagtttaacatgttaacgggtgctgtacagaatggattcgggatcgcgacaatgtttgatggtttatccgtatcgatggaagaagtaatggcgggggcgctcgcattgtcacagcaagcatggcaaactgctatgaaagttttcagacaagtgattagcgctgcatttaacattatcggtggtgcatggggattgattaatcagttcttgcctcaagtaaccatcttaggtgttgcgatcaacatttacgatctggtgtttggtgataattctgttcagactttgaaagatgcgtttaatgcaatcatcaaatccggacaacaaacatatgaaaccgtcataaacgcaatatacggggccataggaagcgcatacaattactctgtggaatatgtcaaagctggcgctcgcgaccttgtggatgcttgtagcgcgttatttgattggtgtttaacgatgttccaaaacggttgcgttgcattaatcgacttatacggtcggatcatgcaaacatgggctatccctccggaagtcccaaacccgttatggtctgcggtgctggctatccgtaacatcatgatgcaaatcaaaccacttgatataattctgggcggtaacttcccaggattcactgcaatggatttgtatcaacaagcacaggaaaaagtcaaggcttttattgatgagtcatacgaacagatccgagggctttatgaacaagggcaggaactttacaaaacgttaaaaaatcagattttcgaacgtgatgcaattcagagaaaattcaaccagtacttaaactggatgtggggcgctgtaacagacgaagcaacagcggcttatcaatctgcattggatgctgcaaacgctgctgtagctgcaacacaggccgcgtatgacgctatacaggaacagattggatctctacaagatgcaatgaaagatacatacagcatggcgatggaagaattaaagaaattgcctttgatgagtacaataaacgagtttttaggattctgcggtgtcgcatttgacgatcttctcaagtcatatgaaaatgcgattactggtgctcagtctctgtacaaaaatttcattgatagttcgcgctcgtttaaagatcactgcaaagtaatctataaccaaatttgtacgctggcgttgagtaaagtcacacaatatgtgaataaattgctgtctctcataggattagcaatcaactttggttcgattagtgtatgtgttccagtactgaaatactaaatagtcgaatgatcaagaggaatttataataatggctactgctaagactaagactgtcaaaaaacagattaaccaaatccccgatatttttatcgggggtactttcgaagaaattaaaacagatctgattgattggctgggtggacaagaagagtttaaggattacgatttttccggctcgcgaatgaacgtactgatcgaccttctgtcgtatgctactctttatattcagcagatgggtaacacggctctatttgaatcgtttattcgcacggctgcattgcgtagttctgttgtacagtctgctcaagaactggggtatatgccagattcgcgcacggctgcaagcacagcagtaatgattacggctgctaacccactgaccccaacatcgatccgtatcccgcgcggtacaaaattcatcggtactgtaaagaatacagacagttattcttttgttgtatcggatgacgttgttatcgttcgtgatagtaataacaactatacatcaatgctgaacctggtgcaaggccgtttagttcgtactgaactaatttatgacggttcaagtatcctgatccgagatccaaacattgaccgtagtcaggtacgtttaactgtaaacggcgcacaatgggaagactggacaaacgaaagcattgtaaacgcaacaggcgcaagcacgatttactacatgcgtgaaactgttgatggacataccgaagtttatttcggtgaaggtgaagcaagtcaacaagtggcgggtggtgcattaaccgctgaatatatcgggggcttgaaacctgctaatggttcgactatcgttattgaatatctgtcaaccgatggggaagcggctaacggtgcaaaagattttatctatgtcgatacattaaccaatattagcatcacggcgattaaagagaacccaaccaacacccctgattatgtcggtgctgatggtggtggtgatccggaagatatcgagcgtattcgagaactggcccctgttatgcgtgaaacacaacgccgttgtgtaactgcatcggattatgaatctttcctgtctcacagatttggttctatcatccaggcggtacagtgctttactgataacgaaaaacctggttatgctttcatttctgttaaaccaaagtcaggtttgcgcctaacatcggtacagaaagaagatatgcaaacgtatctttcgaaatataacctcgcgacgatcaccccgtcgattatggatcctaactatctgtatattgtgcaatctgtcaaagtaacgtatgatatcagtaagttgacggaatcagaggaatggttacgcggtcaggttatttcgtcgatcgactcttactatactgacaacgttgaaattttcaacaaatctttcagtgtatctaagatgttgacttatgtcgatcagtctgatacttctattattggttcggaagcaaatattaaattgctccgtgaaattgacaactattacagcgcccctatgtctgggatccatttcttgaaccaggtggaatctaaatcaatcatttccagtacgttcaagttcaccaacgaagatgacgaaagttatgatgttcgttatgcttctacggcaatggatcaggatggtaacgcaaaaattgtaataggcccgttcaaggatggggatatttcgatcgctgcttatacaggcgatgactttgaaaaattaacagatgcaggaacccgtaataaatattacgaagttggatcggtttctcattacaccgatttcattagctttgacctgggcgttctgaacgtatccgccgatagtttcagcgctgcttatatcgagctaactgcaaaacctctcgaagaaaccatttttactcgcgatggttcgttgatcgtgtttgaaaatgacctgcgtcctcaatataccacattgactatgaatcctatcagtcaataatctttaacccctgtcttcggataggggtttttctttttataaatacgtgatatacataaccgcaaatttggagaaatataatgattaaagcgccttcgattacgagtttgcgcgttgataaactggctgctaacttcgtttaccttaaatgggatgatgttggcatggatttctattatgtggttgaattggcccgtagccgtgatatggacggaactattattccagacgaagagttaatctggacgcagttgggttatagctacgaaaacgaatggtttagcgatcaggttgccccaaatacacgttataaattccgtattcaaacaactcatgaagggtttgaaccttctgattgggtgatcagcgatgaattatggacgtttgatgagaacgcctacgcatatacaaccatgcgtgaattcacccctgctgattcgtttatcaatgaaaaattcgccaaaaacaatcgtgattacgtcgattttaacgatgatgttattatggcttctctgatggttgaggattttgtatactctcccctgtattctgatgtaagccagatcagcgataagatcctgaaacaagaaagctaccatgaaattcaagatcacatcgaacacgtttgtaatgatatagatcgcacgttcctggtatactcaaacggattgctttacctgtttgaacgttttcagaatatggctaaagtgtcaaatgacaaaggccaaacgtggtattactacaaagcattaaacgatcgtgtaggcaatccggtttcccgtaccattgcttatcagagcactaacactacgtatgtgttaggatacgatcgcatattttacgggcgcacgtcaacagatattcgttggtcttctgatgaagttcgtttttcttctgatgatgtaacttttgcgaagctggggaaccagtcagggttagattttgatgttgactcatacaacacgtatgcgcgtctaccgggcggagtgtcgaagtatgccgaagctatggcttgttctagtgattggctctatgtggctgctaagaacgttatgcgccgtattgcgttacgtaacacaccaattgatactgatcctggttcgccgacctttggtgaacgtatttttgatgaagtttcatatactatcgtaccaggaaatgataaaattgttgttaaaaaaatggatgtgctgaatgatcgtctgtacgttctggtaactggtgaagttaaaacggcgatgatggatccaactgtcaaagctaacgtgatcccatcaaacgatgctggcgtttatctgtgggatgagaatgcaaagacgtttacccgtgtttatggtaaaaccgaagatgaacgtttttatatcactcatgaatatacaaatatgtcaaccaatggcgatgaagtttacatttctgttggtaactacaaatatccaggcactttgccagatccagatctggttgaaaagtatccggaagatgtgcattcagcggtgaaatacgatcttgttcctggttatactgcgagcatttcgattaactttgctacagttcgagcaaatcagaacgatcctactgtttggaactttgggccgcaagagtactacaatgaagcaaactttagctggcatttccgcgataatgttagcacatggatcaccaatgataaccgtcctctggtggtttatccggaaaccctgtatactctggttactgatagcgcgtctcctgcgtcaacgattcgtgtaaaccatgaagtttgggacaaaggaacagttactatctacttgaataatatcaaatttactggttttacgaagtacacaaacggtgttctgttgtatcgctcaggtggtaggataattggattctatgaactgtcataccgcgcaagggatgaacttactattttctggaaacctgataacactttaatggtggcaagtctggttaatcaggaacgtgaaaacccatacacgccggatattgaacctggactaatagatcctgatctgagtcacatgattactcgttttgctccgcaaagctatctggacaaccaacagttcgaaaaatttggtgaatactatctgcaatatatttcgttgggtagcaacagttactataacaaattgctgaacctcatccggaacaaatatccgagagagaaaaacaacgttgaatatttgtggtctgaaattaaccgccgtaacatttacctggataaaaccaaacgtgaggcagtggttagattttttgaatcacgtgcaagcgatttctattcaacaaaagggattgaggcaagttatacgttcctgtttaaattactgtataacgaagatgtttccgttgagatcgaaagctccaacagtctcgaatatgatattttggttagttcaacaaatatcagtcaggatatcgtaggccggacgatctatacaccaactggacgcgctaacgttacatacatcgaacgtgaatatgaaaatggtcaattgcgttggtcaatgactctgcataatgctcaaggtaactttatcgaagggcaggttgtcaagtcagaaaaaaccaatttcaccggaatggtaattcgtggtgttcgtggtaaacaaatggctaacaactcgatcgactatataaaccgtggacgctcttactacgtgatgaaaattcgttcaaatctaccgacttcccgttataaggatgacgtattgaggtttgttcatccggtaggattcggcttcatgggtattacgatgttaacagtattcatcaactctggtttgtcaatgactcataacgagacaatcattgatattctgagaaactaccgtttcgatagtggttatcctaagttctggcctgatcgcattgcgagcatggacggtaacggaaaccaacaattcgacctggttactggtgaacctctgtacaccgcacacccgcgagcgggggaaccttttgatgtacctccggaatatgacgttgaagaaaaaccgcttaacggtgttcttccttctgcgcgacggttcgatcaaagtccgttgttcgattgctcaggcgttaaatattcacagttccgtaatttggtggatagacgactgaaagatgatgcaggaaacccacgtgatccaaatcctccatcacagattaaggtaggaaattaaatggcacaacaaaacttgtatcggtcggtaattactgcaaaattccgaaccgaaaacttgatgaacttcaaagatatgatcggcgatgccgccgatctaaacacgatttatatgtctattgggcgaactgaatcatgggcggataacgaatccgaccctaactttgccccgccatatccaaatgatagcaccgatggtgttagtgatatgtggacgcatatgatcggggctactaaagttcctggtgatatgatagatgcaattttaccacgtaaagactggggtgatactcgctatccaaacccgaaaatcttttactttaacgatattgttgttgtaaacaccgcgccttataaccgtactgatccgggtaaaggttggatggtttatcgtgtagttgatgttcctgatatcggttcttgctccatttcgagcattaccggaaaacttgaatgtatcaggatcggcggtatctggagtccgtctcatgaatcgagtgaacctccacgcggagaagctaacgggatcgacatgggcgacggctataaatgggaatacctctacacaatcccgccagatgtcgtgatcaaccgctgtacgaacgaacatatcgtagttcctttccctggcgaactggaagaggatccggtacgttggggttatgataacgtgattcaatggtatccaggacaatacgatctagtgtatcggttaaaggtgaattcaatgcgttttcgtgcgtacatggattctcttttcttcccgcaatctacgctccctggtaacaaagggttccgtcagataagtattattgtaaacccgttgattaaaaaggcaagcccgaccgaacctgaaaagaaagcaactggtgattactataatgctaacgcgcttgaacctgattccggacgtatgatttacatggaaaacagacaacctattattcgctcccttgatcagactgaggaagtgagtattgtattcgaattctaaggaaaaacaatggcttaccaaacagcaaaaaaactaattgatgtcggtgaaatcggcaacccatcaacaggcgatccgctttatgatggtggtgttaaactgaacgaaatgatcaccaacgtttataatgcgtttggtgatgtgcgtatgctgtctgcaaacgaaggtgtcggtaacatggtgatccatgctaccggatactatcagaaattaccacgcacttactattcaagtacaccgatcgaactgggttccctgcatgacatggatacttcaacaggttcgattaccgttgttcttccttctggtaaggttggcgaaggttgctacttcataaatagtacgggtagtgtctctgttgatcgtcctatcgcgtttcgtcctcaagttggcgatacaatcgcgggggttgcagaccagttgtacatcacgtcaccttacacctttgtaaaaatctggtgtaccaaaaaagaaggtgcgatcacaacatgggattattctgtagaatctatgttcggttctaaaacgatgcctgttgacactacggcgcttgtactgaaagcaaacccgactgctattcctatgttcggatatagcgaatttagcggggctaaggtgctcgtatacgcagaaaacgtagctggtacagttaccaaaatggcggaagttttaatgaccgtggatcgtgtaaacaaaacgatttattcaacggaatatgctattttgaaaaacagtgaagatgaaatgtttacattaaactttactgtcggtgctggtgatgtcgtatacgctaacgtgcaagcgatcaaagaagatcgaattaaattcacgattaaagcaatcgatacgattaaatcagggatcgcgtcatgaaacaagaaattttaataggtcaggttgtagacgatggtacaggcgattacctgcgtcgaggtggtcaaaagactaacaacaactttacagaattgtataacatgctgggggatggtgagatcccccatccagcaggtgcctggaaaacctttgcgggtacgacgctatcaccaaaatttggtgaatcatgggcgttgaataccagtgcaaacaaaatcaccgtaaacctcccgaaaggtggcgtaggcgactataacaaagttattcgtctgcgtgatgtgtggtcgcgttgggctaccaacaacgttagactgatccccgcaactggtgatactatcaaaggttccccaactcctaaagatttgtttaaagattttatggatgtggaattggtgtattgttctccgggccgttgggaatacgtcgaaaacaaacagattgacaaaatcacaacttcggatctggcaacagtagcaaaagaaacgtatattgctactcagggacaaactgacttccctaacgtattcggtgttggtaatgaatacaacctgcaatcgttcgaagtttactatcgcggtaacttgcttttcatcgatgagaaagacggattcaatgctgataactcagactatggatcgattggttctgctcctggtgaactggttgcacttgatggtaattcagtacgtcttaaaaacccgtgtaacgctggtgacacgcttcaatttgttacctatctagatgggttagcaacatggcgttcgagctatgaagcgtatgtgatgcgcatgtatcagactggtgatacttctctggaaaccgttcctggtgaacagtgggtaggtgatctggcaaccaaaaaagagtttacacctgctgaatttggtgttaaccctcgcgtgttgattaaccctaactcgtttgaactgcttctcaacggtaaacaactggttaaaggcggtgacgctgactatccggcgttttcctgtgaaggtgcggaaggtgttgatgaaagtacgtgtgttggtaactctggtgtatgggttccgtcaggacaggattatagtttagtattcactgattctgtagtgacttcaatcaagtttgctcaggaactggaatccggcgacgttgtaacgatccgttggtttaacaatgatattggtactctgatggattgggaaggaactggcggtattaaagaaaaagctgataaggtttatctcaataacgaagaagaagttatattgacgaaccgtatcgaatataccgattataataacccttctcagaaaacaatgcgtaatacaggggaaacctatcagggacgtattctggatattcaggctatgtttgatattatccacccgatcggaaccatctatgaaaacgcacacaacccggcaaaccctgctgattatatgggatttggtggttggaaacgttacgcagaaggttatttcctggctggctggacatcaaatgcagcggatcctgatttcgcattaaacaataatgatttagatagtggtggtcaaccgagtcatacggcaggtggtacaggcggtgatcgtggtacagaaatcaaaatcatcaacgttcctgaacttgtatcaaaagataaagttctgattgctgatgaaaatggtgctgtgatcattggtggttgtcagttagatcctgatgcttctggccctggatacactaaataccgtgaggatacattgaaagtgaatcatggtaacacattacctgataaaatcaaaactattccaccgtatatgactgcacatcgctggataagggttgcataatggcttacaacaatatttcaaaaacaagggagggcgctcgcgtcctctctaaagaagcagattacttacagtatgatacttatggtaagttgcctctgatcggcggtaaacgttcgatcggcgaaccaaacattgaccaaacaaaacgcggtgttctgtatggaaacgtacaatccgcaattgatgacctgtatacgcttatcgagcaaatcccgattaacggcgttgttaccatgactgaggatgcccctccaatcgctgtacagcaggttgagagcgtttcttttgatggtattgtacagaacatcgattcagaccaagaacaggctgtagttcacgtgtacggctttcctttcatctttgataatgggactaacgccgcaactgtttgtgaaacggcatacaacaaatttactgaattcgttgcagcggaaaaatatttcgcagaagttaaccgtaaaggtgttgatggtacgatcctagaatgtcgatttattgatagtgttccgcacccggcaacaaatatctcagaaaacggtattcgtcaaatcggaactatcgacgtagccgcaaaaagtggctatggttcatgggttaagttgggttctggtttcttacctgatgttactccgcaagtaaccgtgtattacttcaaacgaattgcataaggataacacatgagtaacaatacaatcaaccacgtaagtgataaatccatttacgtgacatttgacccaacaggtactgattggcctgataccataaccaacgtacaagatgcgttggaaaaaataggtagttgggcgcgtactgatactgggcttcctatcgcaacaacttctgttcgtggtattgctcagatcgcaaccgaagctgatattaacgctggcacggataacactaagattgttactccgaaactgttagcatatcgtatgcagaaccctaaagcatcacaaaccgtatggggttatacgaagtattcgactgatgcggaatctacaaccgtaactaacgatgcatcgtctattactccgcgatcgctgaactatgtgttcaataaccgcaaaggtacagaatcggtttggggttcttctaaaatcgctaccactgcacaggcggttgctggtacagataacactgtaactatgactccgcttaaagtcaagcaagcgatcgcgtctctggttccggttcagtcaagtgcgaccgaaagctcgcaaggtctggtacaactggcaacagttgcacaggttcaggctggtacgatccgtgaagggtatgcaatttcaccttatacgtttattcgtttaactgcaactgaaagcaacctgggcgttattcgcatcgcatcacaggcagaagcaaacgcaggtactgatgacaccaaagcgattactgcgaaaaaattaatcaatacccgtgcaactggttcccagttcggtgttgtcaaattagcaacaactgttggttatgtggcaaacaccgcactttcttctaatgcttatgtattgcctagcgatcgtagtgcggtaattaatggttctctttatgagaatagcgcaatacataacaacaaatatcagacgtggacagatcttgattggcatttcccagtaggtgctattgtcatgactggtttccagactgaccacggtagtttgtatatttgtgatggacgttcactgaataaaaatgattacccgttactgtttgagcgtataggatatacatttggtggtggcggtgattggtttaacattccagactgtcgaggcgttgcagtacgtggtcatgaccgtgggcgtggactaaaccctaatcgtgggtatggtacatatgaaggcgatatgttgggctggcacgaacacccattacagcttatctaccagaacggcggaaacattccgaaatggcaagcagtttacgaactgaaaagcgccgagaagaatgaccaaagcgctcgcgtatttgatgcttctataactaaagctactggtgtgggcggtgaagaaacccgcatgaaaaacatcgcattaaactacgtaattcgtactcaatagaggttattaaatgatcatcgacaaattaaacccgttgccgaagatcccgtttgttgatggcgtcccagatgacgccacgactcaaacgaagattatttggatcaaaaacggtgaaactctggacggttcgccagataaagtgtcaaacactggcagtcttaaccgaactggtgtaaacatccagcagaacgcggttcagttagaacaaaatactatcacccataatgataaaatcaacgaagtaatcgatcaggttaacttgattactgaaaacattgatgctattggtgatgagagcgtaatcaaaaaagttaaccagttggatcaggatgttcaggcattaactttatctaacacccaaacacagaacaaggtagcacagttaaccctttctgtaaatgctcagaacgatgaaattggggaatacgatccagaaaaggatcctaaacaccgcacaattcgtaatgatatcatttacattaagaaagaagttggttcatatcctggatttaacgttgatggtgatgttgacccctcttctactggtactggccttaaataccgcgtactgagtaaccaacgtgctatttctatgcaggaaactcgcataaccaaactggaagatgattgggcgctttccgaagtaggacaactgacagaagaggtaaaagaacttcgtgctgaaatgggtgattctggtcttgccacaacccgatcaatctatgcgcgaatcaagatccttgaggatggttctattgtaatgcaaaatgaacttgatgcgattaatagttatatcggtcgcacgtcaggttcaaccagttccattaacgatcgtgtgaacagtctggaaaactccgttagttctctggctacacaaatcaatgatccggtaactggtatcactgcacaaattgcaaccattaacggtcaaatcggtacggcttctgctcagggtagtatccgttatgatattgcggaaactaaacgcagattgatggatatggaaatgattctgggtgaatccggcgatgatggattgcagggacaagttgcgatcttaactggtgacgttggtgaagattcagatcctaccagtatcaaaggccgtttgagtgttgttgagggtgaattacgcaccaacactagcgcactatgggaactgcaaggcgttgtaggtaactcttctagtggcctcgttgcaactagccagcaggttaacaaagaaatctatggtgatggtgttagtgccgatcctgttactcgcgctggtttgaaaacgacaacccgcaacctgttcactcaggtaggagataactccgaaggtaacgaaacgggcatttatgcactgattgccgaccttaataaacgtgttgaggatttagaagcgttgaacattgcacaggcacttgcagatcgcgtaactatcgaagatctgaatgctaaactggctctgtacatcaaagaagctgacgcagatctccgttatgagagcaaaaacccgcctctgtcattcggtactaacctaactggtgatactgaatacactactggcgatccattgtctctaagcgtaactatgaatggtggtgtttctccgctgtcttaccagtggacgaaaaacggtgtaaatgttggtactgatgctaacacatttaccatcgattcgctacagccttctgattccggaacttacaaagtaacggtaactgatgcaagccataaagtcatcgtttctgatgaactgacgatcactgtcgcttaacgattaacaaggggcttcggccccttttgaggatctttatgattacgaacaacccagcacaattaaaagatgaaattctgcgccgtttaggtgctccgatcgtcaaaatcgaagtgacaaccgaacaggtttatgactgcattcaacgagcattagacctatatgcagaatatcattacaatggatctaacaaagggtatatcattctcaccctggggccggataacccgaaaaatattttcgatctgagtaaagaacacattttcgcaattactaaagtgttgcgtactaacatgggttcccttgtatcgatggatggtactgcggtttatccgtggtttactgatttcctgatgggccttactggtggttctctgggcgggggtggttgtgcatcacgtacctacggaatgaacgcatacggcgcggatatgggctattttacccagatgatgagctatcagcggtcaatgcaagatctcctgtctccgcttcctgattactggtataacgacgacacaggacagtttgcagtatacggaaccgttaaagatggtgatattgttgttatcgaagcaatgatcagatcctttgttgatgtacccagtatggtcggtaacgtctctggatacgctacagcgggttctgatggtgaagataagccaactatagcagatatatacaataacccctacaaagccgtctcaggcggcgtgaaggctggtcaaggtacaagcgttcagagttcatcctctgcgtataacaaccgttgggtgaaagattacgcaactgctcttgttaaagaggtaaacggtcaggtgctggctaagtttcagggtatgcaattgcctggtggtgttgctccggatggaacccgactgattcaggaagctatgcaagaaaaagaaaacctccgtcaagaacttctgttactgtctgatgcacttccagtgttgatgatgtaaggaggaaaaatgcaaaattgggatgaaagtctgtttgcacagttagaagatggttccggcgtcgatcggaacctaagacaagaagtaacaaacccgtatgttaactggtacaagtataaccctactcaacagttgcatgattcactaacagccgaagcaattcaaatgaaatctccggatatgtattacgtccgtcgagaatttgttaatattgataaaattttgggcgaagaccgtgaatcgaagtttacaaaatcgtggaaaattgcagcatacatcgattcgtatgcaaactacgaaggacagagagacttttacagcaaatttggtatgatgtcaaacgatgaaatgacacttgtgatcaatcctcgtttatttgcacatcaaactgatggcgggatccctgttctgggggatttgatttatttccctatggataacagcctgtttgaaattacatggattgagtttgacccgttcttccagttcggcgatcgtcctcaacgtaaaatcaacctcgttaaatttatctatactggtgaagaattggatcctaaactgcaacgaaatgaagggattaatcttgctcccgatgctgatctggatctcgaacctattcgaaatcttgatggattggctgataccaatattgaacagtacgaagaagatcaagcctttgaagatgaaggcgatgaattcattgaatcgtttgatgttgttaacgggcgcggatcaccgttcgcacagttcccataaatataaccaggggaaaccctatacatgtaagggtataggagaaatcttatacccgctttatatgaggaatttatgatatatacaaaacttagagaatggttgcctgatgatttatacagtgagtatgtggatatcataaaggcttctccgaaaactaaacatacagaaaaacaccacatactacctcgttctatgtttccagaattcgaacacgatccagaaaatattgtagaacttgatataatgaatcatttgatggcccataggacattagccaaaaccaaagatcataaaatggtacttgcttttttcatgatgtttacttatgagcacaaaagatactcagaactttcaaaacaagaccaacaacaggttttggaagaaaaagtgaaagctcgcaaagcaatgagattagttaaaaaagaacaaatgaaaggtaaatacaatggtgaaaacaatcctttttatggaaaaactcattcagatgaagttaagaaaaaactaagttctgtccataaaggtaaaaaactgtcaccagaacatcttaaaaacctcgttgctgcacacaaaggcaagaaacgagaaaaggtaacttgcccccattgtgggataatgtgcgccgccaacacagcaaaacgctggcactttgataattgtaagtctggacgagtccagcagggggattagaaaatttttggctactggtataatagttcgctgcgaaattatattgtcttgatgggttgtcttttcaatcacgtgcaagttaaacgcgttcgcggcgaacaagaaaaatttatcaaggttccgattacctacgcatcaaaagaaaaattcctggcatccatgaacaagctgaactatgcatacagtcaggaaaatgttgctaaaacggaaacaattttaccacgtatgaatctatccctcgttgatttgcagtataacgcaattcgtaaaacggggatcgcggtaaaccaaaaaatgacgcagttacgcgcacctggaaaaacagtaacgcagtttaaccctgctccgtatcgtctcatgttcgaactgggagtgtatacccgttacgaagatgatgtgtttcagattatcgaacaaatactgccatacttccagccgcatttcaactgtcgtattacagaattacataaaaacgacattaaaatagaccgagatattaaaatatctctgcaatctgtttcccctgatacatcatttgaaggtgatgcaacgacacggcgacacattgaatggtctttaatgtttgaattacagggctacctatatccgcctgttaacgagattaaaggcgagatcagaacagtatacacggatttcttttccaatatgaacccgttggacaaagataattttgaatccgttgatgctcaggtggatccggttgatatgcctatacaggattacacgggagaagaatacattcaaacgtatgctaatgatatcccaattcctagcggtgatcaacctcctaaaccgaggggccaatgatggaagaatttagcgtaaaacaactacttgatcttgaaaatctccctggtgctgaaactggggaagaaatggttgtatatgaaaagctcgaactcgttgatgtcgagtcacacccagcagatcgaaaacctgatttagaggaagactatgcacttgcgcgtaaaactgcgcattacatgaatcagatgatcatggatatggcacaaattgccttgcataacgctaaaaactctgaatctccgagacatgttgaagtttttacaaccctgatgaatcagctaaacaattctaaccagggattgatgaaaattcataaagaaatgcgagaaattaccgaagaaacaacaaaaccaggatctgaaaaaggtaatggtggcggtagtgaaatgaacatagagaatgcaactgtatttgttggttcccctacggaattaatgcagaaatatggtagtgcatacgaacccaaagaaggcttcattaatggtgaagcggtagaggtaaaccctgatggaaatggaaccgacgatcgatccgagtaaggaatcagatcacccaatcggattaatgcatcccgattatctgaaaaagaaaattgatgaatttgggatggagtggacgcaaagcgaacatgataaaaaatggtatccgacaaagtttagcgattacctaaaaattaacggtatccataaagttgatattcaagcaaaagacagttcaaactttgcgacgtataaaaacaaaggaaacaagaaaactcgatataacggaaacccaaacctgaaacgcgcgtacatccaaacgaaatggacgcaacagatgttgatggagtgggttaaatgtcgtgatgatattgtttattttgctgaaacatattgcgcgatcacccacattgactatggtacaattaaggttcagttgcgtgactatcagcgcgaaatgctgatcgaaatgcataaaaaccgtatggttgcctgtaacctgtctcgccagttgggtaaaacaaccgttgttgctatcttccttgcacactttgtgtgtttcaacgaggataaatatgttggcgttttggctcataaagcctctatgtctgcggaagttctggatcgtacaaaacaggcgattgaacttctccccgatttcttgcaacctggtatcgttgaatggaacaaaggttctattgaacttgataacaaatgtaaaattggtgcgtttgcatcttctcccgatgcggtacgtggtaactccttcgcaatgatctacattgacgaatgtgcgtttattccaaactttattgatgcgtggttagcgattcagccagtaatttcttctggtcgtaaatcgaaaatccttatcacaacgacacctaacgggcttaaccacttctatgatatctggaacgctgctatagaaggaaaatccggcttcgtgccatacacggcgatctggacatcggttaaagagcgtttgtatacagacggtgatgatggcgtatttgatgacggctattcatggtcttcgaagatgatcgccagttcaagtaaagaagcatttttacaggaacactgtgctgaattcatgggaaccaacggaaccctgatcgctggctggaaattgtctaaactatcatgggttgatactgatgaaacggaaactaatttctatcagtataaagctccagtagagggacataaatatattgcggtactcgacccagccgaagggcgcggtcaagactatcacgcgatgcatattatagatattacatctatgccgtttgaacaggttgctgtataccattcaaacaaaacatcgcaccttattttgcctgatgtcctgttacgttatcttatgatgtacaacgaagcatgggtttatatcgagctaaatagcacaggtcactcagtggctaaatctttgttttctgagttggattacgataacgttatttgtgatagctataacgatttggggatgaaacagagtaaacgatcgaaagcgattggctgctcaaccctaaaagacttgatagagaaagataaactcatcataaataacaaaaagacaatacttgaatttcgtactttctcagaaaaaggtgtttcgtgggctgcggaagaaggtttccatgacgatctcgttatggcgctggtttgctttgcatggctaacaacacaaatgaaattcgcagaattttgcgagaaagacgatttgcggttggcaaatgaggtattcgcacgtgagcgcgaactgctttatgaagatatgttatgtcctgttatcgtaacgagtggcgacgaaacaatatctgtcggccaacacggtatttcgtttatataaatttagaggaaacttaataatggctttaatctctccaggcattgaaactaaagaaacatcggtacaatctaccgttgttcgaaattcaactggtcgtgctgctattgttggtaaattttcatgggggccagcttaccagatccgtcagatttctaacgaagtcgaactggtaaactattttggctccccagacaatgacaccgctgattatttcatgaacgctgtaaactttttacagttcggtcaggatctgcgtgttgttcgtgtcgtcgataaagaagccgcaaaaaacgcaaccgcgatctataatcagatcaaaaccacgatcaccgctgctggttctaactatgcagtagacgatcagatcaaagttaaacacaataacgttgttattgaagaagatggtgttgttaccagcgttgatgatcagggtaaaatcctgtctgtgttcattccgagcactaagatcatcgcacacgctaaacaggttggtgtatatccggatctgtctagtggctggactacagaaatcgtttccagttcttctggtgtttctgctacgattacaatcgatggcgtagaagttgatccgggtattactctgctcaaccttgacactgcaaaagaaactattcaggcaactgctttccaggaactttgcaccaaataccagctaccgtctgttattgcaatttatcctggcgaaatgggtagcaccgtaacggttgaaattctgtctaaagctgcatacgattcttcggctgtcattaagtcttatccttctggtaagtctggtaaaaacagcggtcgcagttcgatgaactttggccctcagaatgataaccaatacgcgtttatcgttcgccgtggtggtattatccaagaaacgtttatcgtgtcaaccgctaagggtgataaagatatctacggttcaacgatctacatggatgatttctttgcaaacggtggttcgcagtatctgtatggtacgtccctaaactggcctgtcggattctccggcgttctggaactgggcggcggtacttctgcaaacgccactgtaggcgctgatgaactcatggctggttgggatatgttcgcagatcgtgaatctctgcatgttcctctgctgattgcgggtgcttgtgctggcgaaactgccgaaatttcgtctactgtacagaaacacgctgtgtctatcggtgaaacccgttcagattgcgtcgtattcgtttctccgccgcgttctgctctggttaatatcccactggctcaggccgttgataacctcgtagaatggcgtacaggctacaaaatcggtaatactaccccagttgataacaacatgaacgtaagttcaagttatgcgttcatcgacggtaactataagttccagtatgataaatacaacgatgttaaccgttggatcccgctcgcgggtgatatggctggcctctgtgtttataccgatcaggtatcgcaaccgtggatgtctccggctggctacaaccgtggtcaactgcgtaactgcatcaaactggctatcgaaccgactaacgcgcatcgcgattctatgtaccaggtacagattaacgcggttactggtttctctggtggtgctggatacattctgtacggtgataaaaccgcaacgactgttccaagcccgtttgaccgtatcaacgttcgtcgcttgttcaacatgatcaagaaagacatcggcgataacgcgaaatataaactgttcgagaataacgatgatttcactcgttcttccttccgtatggatgcaggacagtatatgtctaacgttcgcgctctgggcggtgtatacgattaccgtgtggtttgtgacactacgaacaacacgccggatgttattgatcgcaatgagtttattgcatcaatctacgtcaaaccagcacgttctatcaactacatcacactgaacttcgtagcaacctcaactggtgcggatttcgatgagttgattggatcaacgtcagtataacatgtaaggggctgaaaagcccctataaatacacatagaggttagaaaatgcttactgatattgtacgcgcctttgaatccggtgatttcgcacgtccgaacctgttcgaagtagagatcccgtacctgggcaaaaactttaaattaaaatgtaaagccgctactatgccagcgtctaccgttgaaaaagttccggtaggttacatgaaccgcaaaattaacgttgctggtgaccgtacctatgatgactggacaatcacggtatataacgacgatgcacacacaacccgtgatgcaatcgtagcatggtcaaacatgctgcatggtatgggtgaagacattacaggggatatccctgcaaactacaaaaaaaccgctacggttaaacagaaaaaccgtaacgacgaagtaaccgccgaacataccatttatggcctgttcccgaccaacgttggtgaggttactttagactgggatagcaacaacgaagtgagcacttttgagtgtactttcgcgctagactggtgggtttaaacgctataaatacaggggtagcaataccccttatcattatttttcggagttgtaaatgaacttttttggattagacaatgtgttagggtttttcaaaaatttcgccaaacaggatgaaatggaatttgaagcccaattaaaagatgatacaggttcgattgcgcctccgaaaaataacgatggggcgcacgaaatcgaaacggacttatcaaaccagcgttattcttctgtgtttcaacagttctattccggacaggatccgcgaattcagaacaaaacacagctaataaatacataccgtgggatcatgacatatccggaagtggaaaacgctgtttctgaaatcattaacgaagcgattgttaatgaacaaggaaaagatattgttacgatggatcttactaaaacgaattttagtaaaaatatccaagataagatcatggaagaactcgataccgtaatgaatattcacgatttcgataaccgaggctctcgtttattccgtgattggtatgttgattcgcgtatctacttccataaaatcatgcacaaaaatgaagctgacggcatcaaagaattacgccagttagatccccgttgcatggaactgatccgagaatcggttacagaaaccctacccggtggggttaaaattttccgtggctatcgtgaatacttcgtatacaccgcaccgaaaaacggttatagctacaacggacagatttatagtcacaatgacaaggtaaaaattcctcgctctgcgattgtttacgctcatagcggccttgaggattgcgacaacaacattataggctacctgcaccgcgcggtcaagccagctaaccagttgcgtttgctggaagatgctatggtgatttaccgtattacccgtgctcctgaacgtcgtgtgttctatatcgacgtaggtcagatgggtggccctaaagctacacagtacgtaaataacattgcacagggcttaaaaaaccgtgttgtatatgacgcgagcactggtaaagttaagaatcagcaaaataacctgtcaatgacagaggactattggctgatgcgtcgtgatggtaaagcagttaccgaagtttcaacgcttcctggtggcactgccttctctgatatcgacgatgttaaatggtttaaccgtaagctgtatgaagcgttacgtattccgttaagccgtatgcctcgcgatgatggcggtatccagttgggtaacgatggcggtattacccgcgacgaattgaactttagcaaatttattcgcgaattgcaaattcaattcaaccctgttcttgcggatccgttaaaaactaacttgatcgcgaagaaaatcattacagaagatgaatgggatgaaaacgtaagtaagattgcttttgtatatcagcaagattcttactattccgaaatcaaagatattgagattttggaacgccgtttaaacctgatgggccaacttgaaggggtggtcggcaaatatatctcccataaatacgtaatgaaagaagttctccggatgtctgatgaggaaattcaaagcgaagccaaacagatagaagaagaatcaaaagaagaacgttttaaaaatccagaagcggaagaggaaaacttttgatgaaagaatttatcgaagcaatcaaaagcggtaatctggtggaagctaaaaaaactttttactccatcatggaagaccgcacagaagcgcttcgtcacgaattacgcgttgaacttgccgaagctgtacgcattgaaggcgaagaagacaaagaaaaagacgacgaaggcgctgataaagatgacgaaaagggcgataaaaagccagccgaggatgataaatccgataaagatgatgagtgaggtgtgtaaatgcaacttgacatcgaaatcaccgccgaagatctccaggaacatttagacgaagcgaaagcccgtgtagatattctgggtatcgatgaaggcacggttaaaatcatcgaaaatttggcggtcaccgaaccaaatttagcccttgctatgatggcggttgttgaaggtttaacacttgatgaggtaattgtcaagcatgttgattcccgtggcaacgtagaacgcctcaaagacaggaaaacccgtgagcgtaatgcgtatcagacgaccggattaactaaatcccaacgtcgccagatcgcgcgtcgtgctctcaaaacaaaacgtgctaacccgtcaattgctactcgcgcacaacgtaagcgcaagaaagcattgcgtaaacgtgctgcactggggctataaatatgaatgaatcccaaatcaacgaaaacggcgatatgcttttaatcgaagaatggggtttaccttgcggtgacgtttcagaatctattttagaatctgttggggaatcaaaagacggtaaattacggatcgaaggtattttccttcaagccgaaaaggttaaccgtaaccgtcgtttgtatcctaaaaacgtacttgaagaagcagttaacgattatattagaactcaagttaacacccgtcaagcattaggtgaaatgaatcaccctccgcgcccgaatgtggatccgcgaaatgcttgtatcctgattgaaaaattgtggtggaagggtaacgatgtttggggccgcgctgttgttgttgaaggcgacggtggtgatggtgacaaactggcggcgttgattcgtgctggttgggttcctggtgtttcttcccgtggattaggtaagctctccgattccggcaaaggctacggcgttgtacaaaagggctttaaattagctgtaggcgtcgatgtcgtctgggggccaagcgcacctgatgcatatgttaagcctatagtggaaaatcagcaaagcaaaccgcttgttgagaataatagtgctgatgacgcttttcgggaattgtccgagcgtttgaaaggtctataaatacattaaacaaaacaacaggaaaatcaaaaatgcttaaagaacaactgctggcggaagcccagaacctggatactccggtcgagttagacagcattttcgaatcagttgaactttctgatgacgtgaaagcgacattcaccactgtattcgaacaagctgtaaaagctggcgctgcaaaactcgctgaatcccacattacccagatcgcggaacgttccgatgaactggtcgaagctcaggtaactgaacgtgccgctgaaatcgaaactaagctgtacgaagatgctgataaatattttgcgcacatttccgaagaatggctgaaagaaaacaaagaagccgtttcccgtgacatcaaagccgacctgtttgaatccctgatcatgggcctcaaagaagttctggttgaacataacgttgtcattccggaagaacaggttgatgtagtcgccgaactggaagacgaactgactgagaatcagcaggaagttaaaaccctgtttgaagcgaatcaggaactgaccaaagaaatttcagaaatgaaacgcaatgcagtagtttcagagaaaactaaaggtttgaccgaatctcaggtcgaaaaagtagaatctctgattgaagggctggaatattccgcaaccttcgaaaataaactcagcgcaattgttgaaatggtagcaaccaaagctgaaaaacccgttgacgagtctgtaaatactccgcaaacgaaagatgactttgttccggtagttgaaagtgttccggcagagaaatccaagatcaataaatatgtacaagcggcaaaagccctttcttaatttcaaaaggtaagaaacaatgtctaagaaaaacgaattgatggaaaaatggaacgatcttctggagtctcaggaaggcttaccggatatcgctaccaaatccaaaaaacaactgattgctgccattatggaagcacaggaaaaagacgcagaagttgatccggtttaccgcgacgagaaaatcgttgaatccttcggtggtttcctggcggaagctgaaattgctggtgaccacggttacgacgcaaccaaaatcgcttctggtaactcaagcggtgctatcaccaacatcggccctgctgtaatcggtatggttcgccgtgcgattcctaacctgatcgcgttcgatatctgcggtgttcagccgatgactggccctactggtcaggtgttcgctctccgcgcagtgtacggtaaagatccgctggcttccggtgctaaagaagcattccatccgatgttctccccggatagcatgtactccggtcagggcgcggctccgagcaacggctttaccgaactggcttccggtactgcgatcgctgacggcgctatcgtgttccacgatttcgttgaaactggtcgtgtgttcctccagaacgtttctggcgctccggttactgtaactggttctaccgacgatgctctggatgctgctgttatcgccgaacaggaaaaaggtactctggctgaaatttcttacggtatggctaccagtgtagcagaactgcaagaacagttcaacggttctactggcaacccgtggaacgaaatgggcttccgtatcgataagcaggttatcgaagcacgtagccgccaactgaaagcacagtactctgtagaactggctcaggatctccgcgctgttcacggtatggacgctgacgccgaactgtctgctattctggcaaccgaaatcatgctggaaatcaaccgcgaaatcgttgacatgatcaactataccgcacaggttggtaaaactggtttcactcagaccgttggctctaaagctggtgcgtttgacttccaggatccgattgatgttcgtggcgctcgttgggctggtgaaagctacaaagctctgctgattcagatcgacaaagaagcaaacgaaatcgcacgtcaaactggtcgtggtgctggtaacttcatcatcgcttcccgtaacgtggtttccgctctggctcgtatcgatagcggtatcactccggcaggtcaaggtctccagaagactctgaacgttgacaccactaaagcagtattcgctggtgttctgggtggcgtgtacaaagtatacatcgaccagtatgcacgtggtgattacttcaccgtgggttacaaaggcgataacgaaatggatgctggtatctactacgctccgtatgttgcgctgaccccgctgcgtggttctgatccgaagaacttccagccagtaatgggcttcaaaactcgttacggtgtaggtatcaacccgtttgcgaactctcgctctcaggctccgtccgaccgtatcacttctggtatgattaccaaagaaatgttcggtaaaaacgcatacttccgcaaggtttatgtgaaaggcttataagttattgaaaaataacgatattaaagggaaccttcgggttccctttttcatttctataaatagtgaaaacaattgaggctatattatgaaacatattatctacaaaataacaaatttggtcaataataaaatttacgttggtgctcattcaacagaagacatcaatgattcatacatgggttcaggggtggctataaaggcggctcagaggaagtatggtatcgataaatttataaaagaaatattacatattttcgatacccgtgaagaaatgtatgaaaaagaaagagagattgttaatctagaatttgttaataatccacatacatataatatgggtatcggtggtgatggtggccctatgttgggtatgtttcattcagaagagaagaaacaagaaatttccaagattactaaagagagaatgacagatgaagtaaaatctcgtctctctaaacttaaaaagggtaaaccacagtccgaagaatccaacaggaagcgctcagagacgttaaaagctaaatatatgaatggacgtatagacagagagtataaacctctcacagaagcacacaaggcgaaattaggccgttctgtatcgatagatggagttgtatactcatccggatcggaggcggcaaaatcccttagtatgtcccactctggtttaaaatatcggattaatagcgacaaataccctacctggaaatttgttgcataaataccattatacactttacgcaggaacataaaatgagtgaaaaattttacacaattaacaagctggtgcgtcagtcacagctaccgcctggcctgtctaaaaaggttcttgatgaggcaaccggaacagaaacaattaacgtagctaatacccgtccagatctggtatctcttacccgtgcggtaaacaacctgatctacggtgaacttgtagcgattcaggaaactaatttgcctaccgcaaccctgttcggtgtgcgttatcgtaaccctaaaggcgatatgacgttttccagcgctgctacctattccggtaagtatgcaagccgtgataacattccagttggtgcggttggtactgcctataccaaaggccaagtttttaaacacccgacaagcgatgtcgtatacgaagcaactgatagcgtaactctcgcaggtgctgatattgatgaagcaattatggtcgcagtattcagcaataaattacgcctggcaagcgaagccgcgccaacaagtcagtatgaaaccagcgaagatattagcacaacttcttttgaaatggatcgttggaatatcaacgttcgttcccgtaaattcaaaactgaaatgaccgtggaacttatgcaggatctggaagcaaaccaattcaacgcagaaaatgtgattgaagatgttctgggtactgttgccagcgaagaagtaaacaaagatatcatccagactctgatcaacgtatcacatcgttacaacgttgatggtgtggtaacaaatggcattttcgatgctacaaccgcatacactgcaaaggatgctccggctttaggtcgtttcctgtatcaattagtgtgtgaaatggggcaggaaatgaatagaacgacttcatttgaagctacctatgtcctggcctcttctcgcgttgtaagcgttctgtctgcgtctggttggatgcatgaaaccgatgaaacccacccgttagcgacagggcgacttaaaaacggttattatgtctatactgacaccaatacaccgtttgattacctgctgactggttgcaagtacgatctgggtgaaatggatcatgttggctctctgttctatacgccatacacagaagctgatcaggcaggttcgatcaagatttctgttgatcctcaatccttacagcctaaagttgctattctgatgcgctacggtttatcggttaacccgtataccactgctgctaatgaaagacttgtgaaaggtgatgactgggtaaatctctcaggcaaatctaaaatgagtcagattgtgggtatcaaacttcctaaactgggttgatagtataacccaacggggataatattcaataggtggagtagggaaacttactccatcttttaataattataattaatattaaattagatcttgaaattataaatgatttatgataaaatttattaattataattattatagatcaaataatttttgaaatcaagtaaaaataaatttgattttataaattagatcatgtataattattcttttaataatatattatattagatcaatttaaatttgactacaaattaatatagtatattatagatcaactgggtaaattggtgagtatgttatgagtttgaaattagaagatctgcaaaatgaacttgaaaaggatatgctgatagatcccctcaagttgcaatcagaatcagcggatatccctaagatttgggctaaatggcttcgttaccattcaaacgcgaagaaaaaactgatccaacttcatgcgaaaaaagaagctgatgtgaaggatcgtatgttgtactacaccggaagacatgacaaagaaatgtgcgaagtggtgtatactgggactactgaaatcaaaatcgcgatcgctggggatccgaagattgtagaaaccaacaaactgatccagtattatgacatggtggtagatttcaccagtaaagcactggatatcgtcaaaaacaaaggatactctatcaaaaacatgttggagatccgtaaattagaaagtggtgcataatgtctactgaaaatgaaaaatgtgtagtgtgcaagtgtccggttccttctactggttatgtgactgaatccgggcgcgtgtgtagcactatctgtgctgactacatcgcagaaaaaacaaaaagcggcgagatcaacgaatccgatgatctgaatgaagttcaaatgttgctgtaggagaatcttatgattggatacggtgaaggaattacagatcgtgatgaacgtccggatctgttagaatctgacgaacatcctgatttttaggataggtaaaactatgccataggcatgacaaaccgattatgcgtaatgaatgaggcttgtacggggttctttgcctggatcccatagttccccattacggaggcaaaacgggcgatggaggcaacaaaatcgcgtcctaaatacatgtgtacccgaaaggggcttgataaaagaatgctggatgataggcgtactcttttgcgccgtccgatggagtttaccttcggcggggtgattgataatataccttcgatcaagggcatgtgaatagaatagccagaatagtacagcactggcgttaagcaaatgtacaaaagccccttcctttcggttggggcttctttttagaacttttcttctccgctttcgagttcggcctttaattcttcggctcgacctttcagcgcatcgcgcatagaaatatcgtctgacggcgcaacatcaacttcttttacacgatttttgtaatatttttcaagctctttaaggccgtccatagtacggcaagaggcgaccttgctcatgaaatcatcaatagccgcctcataaagtcgaaaatcgttgaaactcttcattttgacctctaaatttcgatttgtttgatcacgtagtcaaacttttcttcattgtaaatgcgtactcgttcgattgcgtgtttcataccatagtttttgtatgaatatttatttttagcatttttggactttgccagcgttgctaagttatcaaccaaatcccaaacagtagcaagagatttagaatcatgtttacgcagtacgcgcccaattgactgtttgactataacagcagatttgcaaggatgtccgaagatgatgtgatgcaggttcttaacagaaatacctgtactcagtacaccaatagaaccgattacgatcagccccttcgttgattctgcgatccgtttcatttcgtttcgctcatcaatccccgtttccccagaaatgtatacaacgttgtcatatacctttttgagttgctcatacagccatttaccatgtttgatctgattgaacatcacaaacacgttttcatctttttcccttgccagtttcaacgccagcttacagatccatgcgttacgcctggtatgcgatgttatatacttgatttcgctttggtaatctgcccccttcattttcttaatctcatcctctttatatctcatgaagatggtattaattcgaaggttggtaacttgaccttcctgcatcaaccgatttgtatcaactggcttgaagatttgaccaaaagcgccaatgtattgcatcatgtttgctttgccttctttcagagaaccagaaaggccaaacttgaaaatacactgatccattgtgttgatgatcttctgtatgctttgtccggttgatttgtggcattcatccaccatcaaacacatgaactgctgaaaccactcaggaggcattttaacagccgattgccacgtagacacgtagatcaatgcattactgtttttagcagttcctgaacgtattccaagcattgcctcgcgaggtaaaaggcgatagttgacaatatcaccgatcatctgatcaacaagggcggttgttgggacaatgattagtactttgcctgtgtaattttccagacaccaacgagatatcaacccctgaataagagatttacccgctgacgttgggaggttaagcacagcacggcggtttttaatcgcatggaacaccgattgtttttgataccaatacggatcaatctgcttgtttccgtcgtatactgggtgttcttctaaccacttgtcaaaatctggctgggtaatttcttctgtttcgtggatcttaggatccatccagatagaatacccgcgagactccgcgaattttgttacaagataggctaaaccgtagggcagtttcccgttatagtccatcaagtatatgtagccgttccatccaccatatttgtattttgcctggtactgataacctggcggctggaagctgaaatagtcgcgcaattcatagactatgttagcctctgcctgaatctgcacatgactagtgttaaggaatttgacttcgatatccactatgtgtatcctatatacggtttatatgaatatttataggctaaataatgataaacattggagaactacaatgagtattgattacgaaaaggttgaaggtttcaaagccttagaacaaaaagaagccaaattacagcttgctacctacgcgcaagaaacgtttgatgtcaaactgaaccgtcagaagtcattcgaaaatatgcttgctgatctggaagctgccgtaccagcagaaaaaccagaactgttgatcgactcccctgatccggaaattgttacatacgaaggtgaaccatccgttcctgatgttgctccggaaattgccgaccagattgaaattgttcccgacgctctacaagctcctgtaagcgattctgagacggtttctgatgaactggcatggatggaagggtttaccccgtctatcatcatgatgggccgctctgtttcgaatactggcttttatacgtgtccgtattggatctatgattggatgaaacaaaatccggattggtacaagcatcctgatggttgtcctcattattcagcgcgtcaaaccctcaagtcgctggcatggtacatgcaccgtgatgggatggttactgtacgcgaaaccagaaatagccagttcgacacgttcaaaaaataattttaaaaagtagttgaccttaccctgctgttcgagtatatttgtattcgaaggcgggggaatggctctcgcagtgaagaaggaaatacaaaatgaacatgatgaaaaatgcttactacccagttctgtttgtttggactaatggtgaagttaagaaaatcgtcaattctaaagctccttattacactgtaggtgaagcacttcgccacgctgcggaagcaaattatcctgttcatgctgaacctggttatgctcgttggaacggttctaaatgggttgctgatacctgggacaactacgaagaagaaagaatggagtgtgatcctgattacgtatctcgtcaaatggaagctcatatgattgcagatcgtagactggataatgaagctcgcggattctattgattaacaaggggctacggccccttttcttttaggtgaaatatgaacttaaatcacgaatgtttaaaagatttgagcgatggtaacgagattggtaacgttatttttcttgatatcgatggcgttctaaataatatgcggtgcatgaaatttggtgaacatatggacatcgaatgcgcacgacacttacgccggatagtgaatcacgctaattgtgatatcgtcatttcctctacgtggagaatcggcaacagtacccataatctacgtgaaatattttatccgtggggattgtatcggatcattggtaaaacttgcactaacttccctcatagtactggaatgcgtggtgatgaaatcaaggcatggatcgatactttcggatgtaaaaactatctcattcttgatgatgacaccgatatgctttcttcacaaaaagaacattttattaaaactgatgggtttgttgggttgaccgaagaacaatccacttatgcgatccgtaacgttttcggggttactactccgttttgtcctgaatgtaatgggtatggacgtgttaacgactacgacaaatgcggaacgtgtaacggtaaaatactccggctataaataccaataaacataagaggttaaatttatggcaattccttctgtaacaattagcgccaacaaaaacgaacttttgattggtgaaactttgaccttagaggttaaaaatactgaactagatccgggtgatgtgtttctggcctaccgttggcaaaaagatggtgtagatattccaggcgcaaccgccgatacttacacaactacggttgacggtacaactgctggcgattataccctgatcttaaaacacggtgctgatgaagaatcagcaacagaaaccacgtctgatacaatcaccgtgacaacttatcctgtaattgcgtttggtactgatttacctgcaacaaaatctgttgttactggtaaagaacttaccctgactgttgcggtaactggcggtaaatctccgtatacctacgtatggaaacgcggttctactgttgttagtggtgattctgcaaccttaacaattagcgcggctgcaagtggtgatgcaggttcatatacggtagaagtgacggattcactgggtaacagaaaaacttctagtgcttgtgctgttagcgttacgcctgctcttgcgtttgataaaaatctaagcccgaccgcttccgtaacacaggattctgcattgatccttagtgtaactgtattgggtggtacttctccttattcttatgcatggactaaggatgattctccggttggagacgatgcggatactcttacagtggcaagtgcggctctggatgatgcgggttcgtataaagttgtagtcactgatgcgaattccgataccatcacatcaactgtatgtgtcgtaactgttaatcaaaattctgatgatctcgtttccaaatggacggttcacccgattccgtggcgtgataccagctttaccccgatcggttattgggtacttgatgaaattctgtatcagaaagcacagggtaaagattggaaaactgattatgctgattacaagtatagtgaggaagtacaaacgatcctgaaagcgttcatggaaaacggtgaatgtgagatccaggattcacgaaacggctatattcataaaatgagtgaaatctaagaggctttaaatggcaactgaaaaatggactacggttcatcctattccgtggagaaataccagttttacatatcttccatactggctatacgatattatcgttgatgcctttgagaaaggtgacgactggcgtgattatgcggaagaaaaatataaattagagtttgatactctgaaagaggcgtttgcagattatggtgatattcatgtaatcgaatctcgtaatggtaaactggttagtctgttgtcattgactcctgctcctgaaccagatcctgaccaataaaataaggcaaacaatgaatacacttctttttgatttcgacgacactttagcagaattttctcaggctttttatgataagttcggtgtacgtccggaaggaacgccaaaagaacgatatgacgaaatggcggcttctttggtgcgtactgatttttataaaaaccttccccgtattcaggctgggattgacctcctccaatggagtttccaacgccgaatcggtgatcctgctactttgctgcttcgcgcggaagcggtcagccctctttgggttatgaaagaaaaactgaactatacagataagatttgcgctgaactggggatctctcgtctcgattttagtcgcattgactatccggaacagttcgcagaacatgcctatcgtggtgttctgatttcccgcaaccagaaacatcttgaaatctggaacaattctcatctagctaataaagttcctggtattttccttgcggaaaccctggaagaaaatattcagctagtcacggaagcgcttgcaaaggctaatcaataacaaaaaagggaaccgcaatggttccctttttttacaatctttttaattcatcaagcgctgttttcttatcaccaacaaagaggattgctttacctcctgcttttctgaaaggcaacaccgcttttgcccgatcgtcaaacagaattcctttaccagcgaatgctgctttttcatggctacttttaacgtagtggaattctggaacgtaacccaatactttttgtaatgctttacgtttttgttcggcaacaccgtcagaattgaatttaccgacactggttagtattgctacatcgccaagtgttcttaaatgatggaataattcaaatccttctttgattggttccagattttcgtagaaatcagttttggcaatttttgctttgcactttttcaactcatcttctgtcatcatcgagggttcgccatacattggcacaaatgaaccttcccagtcgaacaatacaccatccatatcaaagaaaaacttattcatatcaattcctcagtttgtgtatgcatactataatgtttaatcattaatgtcaaccccaagtgtcagttttcggtgcgtatgctgcaactttagccacaatttccttatccagttcagctaccgatttctgaggcttaccacgggctttaactttgatgtagtttgacttaacaacaaacatacctttattgcttgatttcttgatctcgctatcaacaccaactttgttaaaactgatccaaatatctccgtccatgtactgtttaagagaatcacccatgttcaggatcttcgccatagtaagggccgcgccttcgtgggtatccatgagaatttctttaggaactacacgatcacgtttctggttctgctgcatagcaatatgcacatcgttcataacccatacgatatgtacgttttctttcttgtatcccagcttttcgacatcacgcgcgatgcttgccagcttgctcatgccttttaacgttacgtcaaagatgaggttaggtttacgatcttctggtgctgccataataccggaataaacacggttttggtttttgttggaaatgttgaaaacgtcggcgatcacatgatggagggtagatacgttttctgggtttttgaggttcattgttttgacatcatgaccagtttgtttcttgatctctgctgcgagtttatcgctacccattacaagttttttcagggcgtcaacgtccagggtaataccttcgatgcctagcagtttttccagtgtgaatcctttaccggaaccagcaccgccagcaagaataacaacctgaccgaacttaggataagcacggcctccgaaggtgatcagcgcttcggttaaggtgctttctgtgaattgtttaaatgacttcatgtaaaattctccagtttattttctattatttattgacatgctttctgacagtggtgtatggttatggtgttcgacggataggccggaagaactttaaaccataaggtatacgatatgaaaatcaatttacatcgcttcattgtagaattttcccgcgaccgcgacatggactcttacaactattactcccgtgaaattgaagatcgttttgcggctcatgttggattccgtcgccaccatacccctaaaatgcgtcctgaccacgatccgaagtatagccctattacatggcaagcccctatcgatggttacgttgaagggatccggatcatgacgtttaacgcgatgtatggaaacgcgttgatccatatcgcacgtgagaaaaaggcagaattccctaacggatggcgtattgatgaagtgattcaaaaccttatgcagttacgacgtgaatacaaagcgggtatgtgtctgcgtaatgaacagtatcagatgtataaaacgtatgcatatatctctaagcacctaattaactccatgttttacatcgttggtaatcatggttccgctatagatatcggttcttatgaaatcgtggcttatgctcgcgaacaaggaaaggccgctgcactgaaaatcattgaatctggtgctatcattcttaaccatcgcattgatactattgcttactatggtgatcaggttgaggttgaaggcgtacaccatgaacgattcaacaaagccgtatttgctaaaaatggttatgcttatggtaatgacattataacttctgctattcctttcgttcgtctaactgttgaaggatttggagaaaggttgtcttataaaccgtcagaagctcaaatgtgtgcggctgctgaaagaatcgccaaaaagcggaaaatgtataccgatgaatacctggcgtatgtcaacaagacaaaagaagatgtagatcgagaaatttcttgcatggatttgtgcctttgatataatgtaagcatcttttaaagggaggatgcatgaaaacgatacattgcagaaatgaaaacgttgtttattatcacggttcgtgtactgctgctggtattgaaagcatgttattacctccctgtgattctgatactctgtctgaaaaaggcagaaagaaaaatttagaccgtgttttctttaccgctgatatcgggttagctcgtatatacgctggaagggccgcgcgttctataggtggggatcctgttctgtacagggttgtgtgtccggttgatgttgtatgtatgaacgaagacaaaggcgcgagcgtttaccatgcagcatgggcgttttgtgaggaattatgaatgataaagtgttggcgtatctcgttttcttgctgggatatcgcttagaagtgatgggcgcgtattcatcaatttatggtgatttaacggctatctggatggttgggttaggggttgcttttacattcctttcctttgcaattgttaatgaatcggaaaaggatattgtatgaaactatatcatgtgatctactctggtgttttaggcattgacaaacaaatgttagttgatgtaatgtgtaaaaaactcgatgaacgaattggaacccgatacaaaaatcatgtatcggaaagtatcttcatcaacgttgaccatccaaatgacatggaagaaatggtcaatactcttgatgatcagcagatcccgtttgttgacaatttcaacatgagcgctggagtgtatacggtagtaacttttgttctaaaaaatgttgacagccgaaacgatagcgtgttgaatgtagttgcaaaaatcgattctaccaaaggaaaataatatgaaaattgtacaccgtagcatttccgaactgtctcaagccgaaaaagtgcaaattcatttcaaattcaatgatttgcgtaaaggttatgccgaaattgcccgtgaacatgggttagataacggcgatatttaccaggtagtacaggaaattgaacgtatccgcgcgttccgttctgcaaatctccctgttaaaaatgcaatgcgccgcgaagcgatcgaaatccatcgtaagcgtgtgtacaatttagaacgtgctaaacgtccgatgaagaaagaaaagaaacctcgcccgtttaaacgcgaacatcttaacacctctatggcgctggcgtttcaagatgcggggattatctaatgcgtaaatctgcgatggatcgttgggctagtattgctacttcaaacgtaaaaccaaatcaagccgcgcctgatgtagaagcggttcgtaaagcaaaagaacctgagattgtggcccttagccccgaactcattgagcatcgccgccgtgcgtctgctattgaactggatctgcgtattgcgcgttcatataatctcaagcatgaacacgccgcaaagaacaaccattcttttgaccttactatggaagattggaaagtattgatgacaactgaacgttgtcagtattccggcaagatgtttagcaataaaccaggtagcccgtatgcccgtacaatggaacgtattaatccacgtctgggatatacacaagaaaatacaatagcggttatcaatgccgctaatgccgaaaaatcacagcttgatgcattcgttaagggtgatgtcattctggatgaagtaaaagtgaagttgctgcgtaaagcactttatcaaatcgaaaaacgtgtgaaaatgaaaggttaaattatgtttaagaaatattcttctctgactaaccattatgaaggtaagttcatcaatggtgtaattatgaacgggcttactggcggtgtgtgggttgcacgtgaaaagatccacggtgctaactttagctttatcaccgatgacggtattaccgttacccccgcaaagcgtactgatgttgttaagccagccgaagatttttatggctgttcagcagtagttgcgaagtattccccagggatccgtaagatgtgggaaaccctcaaaaagaccggaacttatgatgatttggttattcaagtctacggtgaatttgcggggcgcggtgtacagaaagatgttgattacggcgaaaaagatttctatgtattcgatatccgtgtaaatggtgaattccttccggataacctgtgctcgctgatctctcgatctcatggcctgaaaatggccccgctgttgggatatggtacttttgaagagatcaaagaactgccgatcacgtttgaatccgttgtgaataaagcaaatagcggcattggtagcgataatacagtatatggtgaattcgtatatcctatcatggaagttgaagagggcaacattgcagaaggttttgtaatgaaacctgtttcacctgcttttatgccaaacggtgaacgcgttgcaatcaaatgcaaaacaaccaaattcactgagaagaaagcgaagaaagcaacccgctttaatgctccggtttcactgtcagaaaaagacaaaaaccaactcgatgagtttgtttgttaccttacagagaaccgtgtgaaaaacgttctttcgaaactggatctggcttcgatcactgcgaaagatttcggtcgcattatgggcttaacggttcaggatgctatcgaagaaatcagccgtaatcatgggcctttcctcgaacagttcgaagacccagcaatggctaaaaagctgtttgtaaccgaagcccaaaacatgattcgccctgtatggggcaaaatcctgaaccatgaattttaaactatgaacagtcacggaaactatagaagtatttctgatgaaatagccgcaataagagaactccttcaatacgtttcagttgatattacttctggaaatatcgtatggtcttctccgcgtcaaggtaggagggttggcgattccgctggtactatgaaagatggatattgtgttataaagtttcaaaagaaacattatcgcagacatcggatcatcttttatgttgctaatgggtatcttcccgctcttgttgaccataagaatggtgttgaatttggtgatggtatagataatttgcaagaggcaacgcaacaagagaacataagaaagcagataaagaaacgaagcaatgcttctggaaaaagaggggttatttttgataaaagaagaaataactatcaagcgcgaatagttgttgatggtaagcagatttttctaggttcatatgataaccctgaaaaggcttatgaagtttacaacgaaaaagcaaaagaattgttcggtaatttttatgtcgaatgattttagtacagtaattaaaactgccaagacagtaacattaattggcagtcgtaaacctcctgaacgtatcgcaaacattgctgttaaaatcggacgtgctttgaacgaacgcgggatcagggcttattctggcggcgctcctggtatggatagtcactttctgtttgactatagtccggataacagatgtataatccttcctgagaacgggtttaacggccttttctcaaacggaaaggatatcatcgactttcgagatttaaacacacagaaagccgctgacgaagccagaaaggtagcaggtaacttcgatacacagaatgaatacgttcaaagaaggtatgcgcgaaacacgattcaagttcttcgtgaaaatcttgacaatccaactgattttgttttattttgggcggaagaacgtgaaggatgtgttaaaggtggaaccgcgatcgctgtaagattggctaggttgtacagggttccatgtttcaatctcttcaaagaaagtgtattgaacgatgtgtgtgatacgttagggatcaatatcaaacccccaacgttggattttttatggtaattgaacatgcgcccttacttcgtgaaacatacgaaagatgggctgttaataacgcaataggtgaaaatatgattcatgtacgtagtatcggtactgacggcgaaactccggtagaaggccgatcacccactctcgcagaacgagcaagagaaattatcaacgatcagaatactaagatgatcgaacatgcgcgggatacaatcacaaaaggtgttctgaaacacgcgacaaaacaaaaccttatctatgatatgaagcacgatatcggctcttgtctgggtattgaatgtactcgctatgcattccaacgagtttctgaatggttggaagaagaagggctaaaattcgatacagaagaaaaacgcaacgccgctaagatcacaaattctctggctagtaattacaatcaaacgtatcgaaaccatgaagaacgtgaagtgttcggtttcaacattcctgaaaggaaaacagatcgccgtgtaagtgaattcactttttacattagttggtaaaaaggtgttgacgggggttggttatagtagtattctaactcccgtagacaagacactaactcagaaggataaacatcatggaaatcgtaatgaaagcaacttatgctggatactgcctggaagcaaaaggtgttgctaacaatggtaaaggcttacgggccaatgttgaagcaatgctggatgaattacatgcaatgtacgaatacgacaacgtagcgggtagcgttcttatccaggcgttggaagttgatggtgttgattgtgctggttggtgggatgcttacattgactacaacgataaccgggtttacctgttgagcaacaaagattatttctaaggaaccactatgagcgatgaagctgaggctttagaagattgggctgattttgatgacgaagaagacggtgaatatttctgcgttaatcgtggtgcttataaagaccgtttagaactccgtaaacttttatcgggttcctctcaaatatcaggatccaaacgaaaaagtagtaaacaaaaagttcagtatagtgatggttctgtacgtgatgaaactgttgttgctgaattccgtggtcgggttatcacaaaagaaagacaaattgatgtaaagaacttgtatgaagtggctaaggctgctaaaataggttctgtgattgtttgccctgtgtgcaaagaaaaacacacaaagacaacgtatcacaaagttttctgttcgaatggcagaaaaaccagtaaggattgtaagtctaaatatcacaatacaatccatcccgaacgactggatcgggtattttaaaataaacctaaaacgtggagtacgtttatgaacaacaaaactttcgaagaactgaacagcatcatcacttccgtagattcctataaggtttctcactggtcgcaatatccaactggctccgaagaggcgctgttttatattgaatctcgtggtggtaaatttgatcaagtagttacggctggctgtaaccgccttgcgcaaatcctatcacgtccggtgactatggaaaacgtagattttgctaatcggttgtacaaaatgcactttgggcgcgaaatcttcaactacaaaggttggaaagaaattgcagaactgggttacatccctcttgaattcagagcgattccggaaggaaccccagtagcggttaaaaatccggttgcaactttccacgctggaaaaaatgcgctgtggttagcaggacacgtagaaaccctggcgatcaggggagtatggttcccttcaaccgtagcaactctatcccgtgaatgtaaaaaagtgttgaagaaatatctcaagaaaacctccgatctagaaggtgaagcatttgatatggtgttacgtacccgtttgcatgacttcggcgcacgtggaacttcttctgctgaatccgctggtattggtggcctcgcgcacctgtataacttcctcggtactgataccgtagaagcgctgattatggctatctctctgtttgaagattgtcagaaagcgtttgatgatggtgaaatggcggctggtatttcaattcctgctcgcgaacattccactaccgtttcttacggcaaagaaaacgaagactttgcgtacaaaaacagtattgagatcttcggtgaagggatgtatgcatgtgtgtatgattcctgggattttaaagcggcggttcgccgtatcgcagaatataaagattcgattctttctaagggcggtactctggtagttcgtccggattctggtgatatggtagacaatatcatgtacgctcttgaagaactgggccgtatctttggctatacagtgaactcaaaagggtataaagtactacacccagcagtaaggatcattcaaggcgatgaaattcatggccctgaaacaatcaatcgggtgttgaactggatggagtctaaccgttgggcgtctgaaaacatcgcgtttggtatgggcggcggattgcttcaagaagttacccgcgacactcaaaaatatgcgatgaaaatgtgcgcaatcaaaattaacggtgtgtggactggtgtgtataaatgtccaaaaggcgctgaatggaaaaagagtaaaaaagggttgttgatgactatcactgatggtgttaactttaaaaccattgatactctggaacagaaagtgccggaaggctggaaagatgctatgatcacatactatgtcaacggaaagattactgcccgtgacactttagaggaaattaggaaccgtgccgggatttagtatccgcaaaaacgacaaaggaaccgtgattttctatgacaacatgccccttgtagctcgcaaggggctttttgctaaaatcgctgggtattcctttaaactggaagaagtcaacgacgaaacactaaaagagatcgtaagaattgccttacaattaagaggtaagaaagatgaacaaagagctattgacatgatcaataaattgggtgaaactcaatgcttcatagtgaatcgtggttacaagtacgataccattgcaaaatttgaaaaagggctttgtgaattatgagttattatggtgtgatcccatacacaggaaacaagcaaaagctacttcctgaactgttcaaattatttccagacagaaacagctatatgcgattcatcgactgtttttgtggtgggttgagtgtgtccctaaacgtccctaaacccgttctaagcaacgattacgatcggacgttgattgatatgtataagcgccttcaaatgcttcctgacctctctccggtgcgagaattgattaaacagtatggtctgggtaagaacgagaaagaagcgtatctcacatttcgtgatgcatataataagaacaaggatccgctatggctctatgttctaatcctgcattcgtttagtaatgttaatcgaaccaacgataaaggcgattttaacgccaattttggttgtagaacattgaatgattctaccgttaaacggtttgaacacttcaaaaataatgttcggggaattgaattctctagcgcatcgtttaaggatcttgatatctgtttgaatgattttgtgtactgcgatccgccgtacctgatcactgatgcagtttataacaaattctggaacgaagaacgcgagcatgaattatatgattttctcgataatttaaactctgatggtatcaagtttggtttatcaaacgttacacatcatgcaggaaagcaaaatgatatcctgatcgagtggatgcaaaaatataatgtgcataacctcgataaaaagtatctgttaggccagcatactgattcttacgaacaaaataaaacgcaagaagtctacgtgtgcaactatcagaaacgcgacgtaaatacataccctgaaacactggatgacttaatgtaaggtaacatatgtttaagatttttggttatatcccttctgtttacaattgcgctccatgcctgaattctaaacgtctcctggacgcaaaacgaaaagaatatgagtttgtttctgtagccgatgaaaaagacgcagacggcaaaccgatcctgaatgaaacggtcatttctgaactcgaaagcctgttgggtactcgtagactgaccatgcctcaaattttccacgatggtaagcacatcggcggctttgaccaactgcgtgagtacgttcgcacgttgggataaataataacacctttatttgattggtgttattatgctcactaaacgtattactaagaaagattatccatccattaaacaagctctttttgaacagcaaaacggcttgtgcgcgttatgtggtcgccctttagagggtgaccttgaaaaacatcaccttgaccatgatcatgctctatctggctctaatgccggacgtgtgcgcggcctcctatgtaacctatgcaacggtacagaaggtattgtaaagcacaaatttaatcgttctggactggtttcccgtgatgttgattacatcgaatggctagaaagcctggtagcatacctcaaacgcgactattcacaaaaccgtatgcacgacaaatttatacccgataaggttaaatggtttacacgcctgactaaatcggatatgatagccgaaatgatttctatgggctttgagtactcagaaactgaggatcgcaaggctttagcaaagagctatagaagacaattaatgaaggcaaccaaatgaaagtagaaaaacgcgacggaacaatcgtcgaattcgatcaagaaaaaattcgtaacgcagtttataaagctggcggtacaatgacggatgaagacagtgcgattatgcttgtgttgcgtagtcagatccgcaacggtaaagcaatgaagatttcgcaaattcaagaacttgttgaagaatctttgatgaagacaaatccgactgttgcccgtgcatatatcgaatatcgtcatgatcgtgatatcgcccgtgaacaaaacggaaaattattccgtgatatcaagggtttgatgactcttagtaacaaagaattaaccaacgaaaacgcaaacaaagattctcgcgtattcccgactaaacgcgatcttctggctggtatcgtttctaaacatatggcgcgtaaccatattctaccgaaacatattgtagcggcgcatgattccggtgatattcattatcacgatctggattacagcccgttcaccccatacactaactgctgtcttgttgacctgaaaggcatgttagaaaacgggttccggatgggtaacgctgatatcgaaccgcctaaatcaatcggtgttgctactgctcttatggctcagatcaccgcacagattgcttctcaccagtacggcgggacaacctttgcaaatgttgatcaggtgctggccccttacgttgaaatgacgtacaacaaacactttaaagatgctgtttggtacggggttcctaaatcaaaacagtatgcgatggaaaaaacggaaaaggatgtattcgatgcgttccagtcatacgaatatgaagtaaacaccttacatactgcaaatggacagacgccttttgtcacgatcactttcggtatgggtactggttggcgcgaacgcatgatccagaaagcgattctgaaaaaccgtattcgtggactgggtaaaaaaggcattactcctgtattcccaaaactggttatgtttatggaaaaagggattaaccttaatccggaagacagaaactatgatattaagaaattggccctggaatgttcttcaaagcgtatgtatccggatattattagcgcggctaataaccgtcgtattactggctctagcattcctgtatctcctatgggttgtcgtagtttccttagcgtgtggaatgatgagcacggtaatgaaattcttgatggacgtaataacctgggcgttgtgacaatcaaccttcctcgtattgcgattgaagccgaagcacaggaagatgaagacgcgcatgatgcattttggcgtatccttgatgaacgtctggaactgtgctttgaagccctgatgactcgtatcgatagcctacgcggtgttaaagccagtgtagccccgatcctttatacagaaggtgcgtttggtgtaaggttgaaacccgatgatgaaattctggaactgttcaaaaatggacgcagttctatcagtctgggatacatcggattgcatgaaactctgatgcttttcggatctggacaacacccattcgaccggatcggttctcagaacatgggtagactgattctggaatatctacgcgctgcgaccgaagcatggaaaaagaaaaccggatttgggtttagtctgtactcaacccctgctgaatctctatgtcatcgtttctgcaaactggactatgagaaattcggaagtatcaaagggatcacagataaaggctggtacactaacagttttcatctggacgttgaccgcaaggtaacaccgttcgagaaaatcgactatgaagccgattatcattacattgcaactgctggacatatcagctatgtagaattccctgatatgaaaaacaacctggaagcccttgaaaaagtctgggattatgcaatggataaactggactacttcggaactaaccttccggtcgataaatgctttgaatgtggctctgatgatgaatttaagccaacagaagacgggtttcattgtacccattgtgggaaccatgatccggaaaaaatgagcgtcacgcgccgtacatgcggctatttgggtgctcccgctgtccgtgggttcaacgaaggtaagaacaaagaaatgatgcatcgcactaagcatcaaaattaatcaaaaagcccttgacttcggttgagggcttttgttatattgggcctatcgaaaaggagacatactatgaaactgactaagaaaatgaccgatgtagtggcatgtgcgtttgcattaggctacaaagttgaaaatcacccaactcgcgttgaagtcatcaaccctatcaagggccgtcctggtttggttctgtgtgaagacggtacagcatatcgtaatgatgtctctttagaactggcaactactatccgcaccgcaaaacaaatgaaagatgttctcattagcggcgcaaaatgaggaatttataatgtattggacaaaagataaatttgtttttcgtgatgaaacgtgctttgggactgcataccgaaacttagctattcgtggtggttcgttttcagctaatgatttgtctaaggtagtattccctattaaagttactgagtatgacgtattcggtgttaaagggtttactgattactttgatacaaagtttgaatcagaatcttacattttcactaatagcgatcgtgaattattcaaaaaacacgttgttgttaaagagaaaccgttattaccaaaagaagatgaagcaaaggaaatctatgatctcctgaacatgcttgataatctcggtacttgtcatctgttcggtaaacgcgcccgtaaagcgaaagatgttctcaatctgttacgctctcgccggaattacctgatccgggaagcagaacgtaatctgaaaaattcagaaaaacaggtcgatgttcataaatccactcttgcgaaattaaaggctttgtgatgtttccgttatacgctaaagtgcgtcgaaatgtcggtgattcgtatcaggaatggagtgaatggctacgcgaaacaaagtcattctacatttcaaaagcaactgatatgaaaggccgtaacattcgctatcgtaaacccagtggtaagagagtgaatgggatagattacattgttcttgattcgattcgggatgatataaaatgattagcaagatccttgataagttatttccttcccgtattgttgaacgcgagaagagacaaaatcgttttcagaacgctattgactatcttgaagaaattcgatttcagaaattcctcgaagataaaaagatgcgtgaagatgagaagcacccaaattctaaaatggctgacggtgtaacaaaatgtgctgttggtcggacgtggaaacgaaaagactacaaggatcttgtttctgctataccacgcggaagcctggaagattactcaaaagcaacgggccgatcttataccggatgtcttaacagactctgtatgattggtgttgtcaagagaatgactcctacgtataatcatgtttatatggctatcgtaaagaaaagaatgctgcaattctatgcagcatctggggaatctatcaatctgattgatgatttaattgaagttgggtatgtagacgacgggaaaattttaaaagctcctgattatctacgcggtaaactattgaaataggtataaattatgattttcaacaaaacaaattcacgtaatttgaactatctacgctgtgaactggaagctaacgaaatcgaactgtttttctgtggggctacagatccggaacacaaattgcattgggtatcaggtgagattgtaagcctaaccgatcagattgtcgaagaggctacccgccgcaatgcaatcgttaaaattggtgctattgatgtgaactacgaaggacatccttcatttttcattcaatattatccataaaagtattgacctgtatatatgaatgtagtaacatccttcttgtcaactaaggaggatgttatgaaaatcaaaaacactgctactgaaactctttgcaacgaaattgcagaaatgtactggagtaaaggtcacttagaggctatgaaagagtttcaaaagtggtgtgatacccaaaagttagctaaatgggaatacatcgttattgttgaacggatcaaagaactgatcctcgtgaagaaaggtaacatgaaatgattcaactgaaattagacacaaatgcggtgttaagcctgtttccggaaggttcaaccgcccgcgtagatctccaatctgctatcatcaaaaacgtggtgaataacgtagttggtaagcgtgttagcgaagaaatcaacaaacggatccaggaacagttagctgttctaatgccgaactcatccgaaattacacagatcatcaaatctgaattctcggattacgtcgaaaaacgttatgggtattccaatgtttttgatgtcaactatggcaatgttcgcgaactgtctggtaaaatcaaagaatcggtaaaacagcaatgccaaaccattcttaaagatatcgagaaagaggcgattgctcatgcaacagaaaacattattgcagacgaagccgcgtttatcgctcgcgtctcgaataacctggaagttactgtacgcaaagcagtaatgcaacgggttaacactcagttcccagacattattgacgaagcgatcagagaacgtctgtttggtgaaaaagcatgaattacgaccgcatctataatatggatgtggtcaacggaaaagggatccgtgttgttttgtttgtgactggatgcaatcataaatgcgaaggttgctataacaaatcgacgtggaacccttgcaacggaacaccgtacacggaagagacagaaaaccatctgatttctctgttgagtaatccgcatgttgatggacttacattaactggcggcgatccgctttaccgtgacaactatcctactatcctaaaactgcttgagcgcgtttctaaggaacttccaaagaaaaacgtatggttatggacaggatataccctggaggctttacaggccgacccagaacgttctaagctacttccttacattgatgttctgattgatggtaagtatgaaaaagatttaccaactaaaaagccgtttcgcggttcagataatcaacgtatgatcgaattcgctaaaaattcgatagaaattaaaaatattgcttgacctaatgtgtaactatggtaatcttaccacatcgtaaatgacgattaactttaattgagagataatatcatgatcctgaatttcaaaacccgtaaagaagcgcgtaactactgctggaagtggaacattcccctgaaaaccatccgtaatacagggcgcggttcttgcccgtggacagttcaagcaaatgaactgaaaacgttcgtggttggtaaaacttacaaactggttgaccgtgaagggtttactaccaattcacacggtggatctaacaccgcaaacactatccaggcgacacagatcgaaaaattcctgaataacgaggtaaaaattatctcgaaaaccaattcagatactttcaaaattgagcatactccggaaatgacttttagctctctgcgttcgtgggaagctcgttatttcgtcgaagttggcgcggctccagctaagaaaaagaaagccaacccgaaaaaagccaacgttacggctccggttgcgcctgttgcaccagcaaccgcagatcttgatcaaatgcttgatggtggttcggcaatgtcggttgaactggatcctactaaatttgttgaaggccgttcgtatgttctggttaaaccgcagcaatttaaaaatcgttgtggcgctaaccacgggatcaaatcatataccgatgaacacagtaatggtgtatacaccgtttaccatacgacttcgctcggtcatcatcaattgagcaaaacggtagaaaccattgattcccagaccggaaaagttggttactatctgcttgattctgaacgttcgttcttccgtgaactggcgacaggaattgttgatgaacctgttagcgtttccggtaatagcgctatcgctatcaatgtagacgaagcggctaagaaagaagaaatcgcaaaagcaatgacacagcttgaagaagcggttaaagcccatgatgacgcgcttcaaaatctgcgtactgcttccgacctggttcgcaaagctgctcgaaaagtagcagaagtaagcaagtaaattaaactgggtgctccggcacccttttttatgaggtgacacatggaattattagaaggtaaatcttataccctgaacatcgacgctaaagaatttgcagaaaaaacctggcgaaatgctttagctgaattgatcaaaaacaacggctatattacaatcgatcgtattgcgattggggatactgaggacattgcttatgttctgcaagatgatttcgaatatgagatccctagccatatctggaaatacttcaaaccatatgatttaccggaagaagaaccgaagattgctactaaagaagaaatcgccgcgcctgatttaaatttcgtatcttccgatcctaaaatgtggatgactgtaaaacctgttcaacaagatatcaatgatctgcgatttgattatccttttgtcaagcggatcacttcgatttctgtactaccagcgccgactgattcacaggcacttgaatttgcattacagcatgttttcggtgataataagctgtacgcgattgacaaggaagctgctattgatgaacagaaaaaggaaatcatcaaccttctttctctgcatcaacaacttgaagcggtggaattgattgagcgtatgctttctgatacaaagaaagatatcattagcaaaatcactccggcacgaaggaaagcaattgatgaaaatcgagatttacggtattcccgaatcgcttcataaatgttatggttgtattgaagctcggaaattacttgatgagcatggattagaatacgaattttattctgttctaaagccagcaaataacagtgtggggtttgattacgatcggccccgcattgaagagttagcgaaacgtgttcgtagtcgaagcatggcatttacttaccctcggatctttgtagatggtaattttattggtggttatatgcaattgaaagagtatttgggtgaagcatgaataaagaatacattcgcaaagtagcaaacgctattcacgcaacaacgattgattttctggaagggtttgatcatattatccaccctgaaacgctggatagttgggaagccaaactgtttaaaagtatcaatgaacagtttccggaaaaggttaagcgctggtttatcagacaggaaatcgtagcaacgatccttaatgaacgtggtgttgaggcgttcggtgtaacccctctatataagcgaaaccagattacagacgaaacaatcaagaaatataaaagatggttcggaagtaataaataatcagttaaatggccttcgggccattttttgtatataaatattggtattgaatacaatataggaaaaaagataatggtagctaaatcattccgcgcacgaagtggccttgatgctgctggtgaaaaagttatcaacgttgggaaggctgatcgtaatacgctgagtgacggcgttaacgttgactttttcaatgaatttaacggaatccagcagtatgacccgactcgtggttattctcaagacatggcgatcatttatgcgcgtcgtatctggtacgcaaaacagaatattgcttcccctgctggggctttcgacgaatccaaatggatcgcaactcgtaatgacccgaaatgggtttatagtaacgtaaccactccagacggtagcattattgaatctggtagttacattatggctgatggacgctttactgaacttctgtacctgttgccggacaacccgacagagggcgacgtaatcacgtttaaagattgcggtggtttagtaggggtgaacagtatccttgttaagtctaacacccgtcagatccgtttacgtactgtacaatcggcacagtatcgactgacccacccgtacatgatcgcaacgtttatctataacggtaacgtatggcgtgttgctgaaactctggataaccgcgattctgagatcgtgaacgcaaccggaacaggttcattccagttacaatctggcatgacagttttccgtaacagtgctacaggtaaaatcactctccagttgccgaaatatgcaaatgatggtgatgtgatcacaacctatgacgctgataaaatgaactctatcaacgtagccgttttgcagatttatccaggtagtggacacactatttctgatggtgcaagtactggtgttacttcggtaagtagccagaaatccggctttggtatgttcatctttgatgcacagaatagccaatggaaagtatatgatgctgataaccgtgttcgtctgcgtcgtatctatagtgatttaaacgcagttcctaacgattacgtttttgttactgcaaacccttctgggactataccaaacgttactgttacccttccaactgatgttgctgatggtgatcgcgtttacgtatccctttatatgatgggtaaaaaccagaactgtacaatcaaagttaaagatggtacaacggacaagatccgcaccaacaaaaatatgatgcagttcccgcagcgcaaagattatccgcctaatgattggtttagtgtaacttcattagcttttaatgctggcagtgattacctcccgtatatcgagttttcttatctgaaagctacgaaagaatgggttgttgctaattatcgtccaatcgttgaacgtgttgatgcaactaacagatcgcgtactggtgttattgctctggctgcacaggcagaagtaaacaaaaacttggaagataaccctaacgacgaaaccgctattactccgatgacgttagcaaataaaactgctactgaaacccgtcgtggtattgcgcgtttagcgacaactgctgaggttaacaaactttcaaccgatacctatctggatgatgtgattgttactcctaagaagctgaacgaaagaacagcaactgaaacccgtcgtgggctggcagaaatcgcaactcaggcagaaaccaacggaagcaccgatgatattactattgtaacccctaaaaagttgcataaccgtattgcatcgccgaccttgactggtatccttgcccttgttgctactggtggtgctcctaacaccaacacggatcgttctcaggctggtactggggtttatgaccattcagattatcagaaagcggtaacgcctaaaactcttcgtgagtataaagcgactcagttacaatctggtgttgtatggctggcttctgaaaccgaagttattaacggtactgttgcaagttcaaacgttccgaccgttgttactccggaaatgctgcacaagaaaacctctactgatggtcgtattggtttgatcgagattgcaactcagacagaaacaaacgctggtactgattacacgcgagcggtaacgcctaaaacgcttaatgatcgtgctgcaacggaaacgctgacaggtatcattgcaattgcaaccactgccgaagtatcagcaggtactgtaacgaataaagcgatcgtaccgtctaaactgaaaggttatctggacgatacaagccatattactgttgctactgctgatgggttaactcaatctggtactatctggactacggttaacatcggtattcaatcagcaactgaaactcaacgtggtactttacgcgttgctacacagtctgagacgaacgcagggacattagatacagtatttgtcacccctaagaagttacacgctaagaaagcgactgagagcgcagaaggtatcattcaggtggctacggctgctgaaactaccgctggcaccgttgcaaacaaggctgtttctccgaagaacttgaaaaatacaattcaggttgatacttcatggcaagctaccgatctggtacgtggtactgtgaagctgtctaaggggcttggtacttggtcgggtaatgatgtggctggttctactcttccggatgatggttacgcctctgtaggtgttgctgtttctccttatgaattgaacctgacgctgaaacattatctgccgatcggtgctaaagcggttgatgctgataaactggataacctggattcttcccagttcattcgtcgtgatattgatcagacggttaacggggcattgactctaacgaaagaaaccactgtacaggctaacattaactcaaccgccgacgcgagtttccgggtaatgaatgttagtggagatctgaacgttggtgatggctcatcgatgggtaaacttcgtttgaatggcggttcatctaacgactggtcaattcaagcaagttcatcctctgggcgtattgcaatgatctcaacgggtaacactggcacagttcatctttctgtgtataatgatactcgcggcgttgtagctaacgttaaattccaggctcctgaaattcaggcgattggcaaagtgactctgggtaatgatacagtgatcacggctgctggttctgttctctctatgggtactaaaaataagacaactaagatcctgacttctgatgctggcaacatcgtagcggaagaatcagggaactcttataaagtctttactgagaagaacgcgcaaaccttgctgaatcctacgtatgtacgtaaagcaggtgatacgatgtctgggcgcttgacggtaagcaacagttcaattatcattgcaggtcaagcggcttggtcaacgctggatgcagtaacagaagcatccaggggcaactggacggctgagatcacagcatcggcacaatacaacttgcttcctggttatgcggttccggttcttgaaccagatccgattaatccagaaatcatgattgtgacccgttatacctatgttaaagcaccgggtactttaacgcagtttggtaacggaactgcattcacttatcagatttgggcacctcgtccgacctctggtactggtgttaatgcgctggcgcaatccttctggatccgtcaaatgaacccaattacgggtaaatttgatggttggggccgcatgtatactagcaacaacccgcctactgctggtgagattggtgcaacgtctgctgttggtactacggttaaaaacatgactgttaccgattggatcaaagttggtaatgttaagatttacccagatccggttactcagacagttaaatttgagtgggtggcataatgtcaaacttaatggcggggttcggccccgattttgtagaaacgcaaattctatcggaaacaaacagcgtaacttacagaataaccgcaaaggcaacacatcccaatgcggttcctaatcagtatgagtttacactaaatcaaaaggcggtagggacaccgcctagtgttgggatcaacgtatggagaattaacaatgctgtagttgatccaattaaaaccttcacattatcgaatgataattcagcaactgcaaacaaagcgtttgttgaatatatggatgctcaaccttctgggctgtatttgataatgactaacggtgaatacaaaacaagccaaatcgttgatgattggtttgctaaaaacagatccgttatgtggcaaggcgctgatttcgctcagagattcccaaattctgcatatgttgcattgtatggggcttcaaaatctcgtatactgattgaatcgttttacgcgaacgatggagttttaaaagaagattcacgcgcatcaatcgatcttgtctatgataacgttggtgatgttgggcgaactggtgtacctttccgatctgttgaagatacggaagaatacaattcaaccaatgggtctgaatataaagtatatcctgttgcaaacccagtgatctctaaactggctgattatggtatggctcctggattagctatgatgattgctggtgatttttacgccagcaaagcattattggatgctggatcaacaacaagggttactgttcgatggtttacgggtactgctcaaacttcatcatcggtgattgaagttcctgcaaataaacctgatgagtggttacgatttgaacaattctatacgatccctagtggttgtgatggatttaacgttgctgtatctcgttatcctaaacccgctacggatagtttatctgcgatccgtaactttgtgatggttcaggtatctgctgccgaagctgatcaaaactttgctgcacagtttggggttaacggtatcagaatgaacaacatgatcgatggtggaacaccgtatatatttgaattgccgaatactaaggtttatccaggtggtgattattctgcttccgaattccgtgaagttgatgcataaacaaaggcccggaacatcgggccttataaatatgtaaaaaggggttattatggcagatttaaaagctggttctacagtcgggggtttacctatttggcactccggcacatttccgctggttccggttggtaatactctaacctatcgcggatataaggtttatactgaaaacgataaaccacaagcatcaaataacgacttcgtttctaaagcaagcggcggtcaatatttgggtgtagttgccttcaaacaggggctacaaattaacgctactttcactggcggaagtgaccagaacggtttatattctggtgatggtgatggtgcgacatttgataaggccaacattgatcttgtatcatggtatggtattggtattcgttcatcttccggaacaagtggtcgcgtattagttatcaatgctagaaatggtgatgtaaacacgaagggtaatatcacggttgaaaaacaaatcagtattacttctgcgaatcctacagatggaactcacgcaacgagaaaaagttacgttgatggtcagataagtatagttacatcaaatgctaatagcagggtattacgcgctggagatacaatgacagggctattaactgccccgcaattcgcgagcacaggcgcggcttcccgtcccgaacacgtaccacggctcgaccaggtaattactaaagggactatcatagattttggatcttattaaggtgaaacatggctgatttagcaaaaattcaattcctacgtagcacagttgcggggaaaacacctactacaagtcagcttgcagatggtgaactggcgatcaacatggctgattatgccatttacacgaaaaatggttcttcgatcgttcagttagcgggtaaaggtatcccagaaacaaataccaaaaaattaacagtaaatgggcctagtgctcttaatgataccgttaccgtagcggaaggtaaaactattactttcaccaacgcggatttgagcgggggtatggttcgtcatatcactggtaaaaacgctcttaatgatggttggtacatcggttctggtggtgagagcaataaagggtttttagaaatcggtacaattgatgacggtgatgaagagatccgtttcgtttcccgtggttctggtgatactgttcgtcgtactctgaaacttattgattccggtggtaacactcgcgtaccaggtaacatctatattgatgaagctatgggcggtggtggttctgcttttatttcaaaaaacaaagcatatttcggtgctggcggtgctgatatctatatgcgtaacactgctggcggtgcgacaaatcagttaacgatcactgatggcggtgaattgctgtttcaagcaaaacctgtatactgggacggtcgtaaaccgactttaaccgaattggggatcggtctggttgaaaacgcacgtcagcttgaacaagataatttccctgtaatcacggggaatgataatcgttggattaaagttgctctgttaaaagatccgggttccggtcagagtcgcttgcaactgatggtgactaacggcggtaactatggttctacgcgtagttctatcgactttatcgattgtagtgctcgaagcattccatcgacattaacaagcagtaacatacgctcttatctgcaaattcgtcgtttaggggatccagcatttgataatactaaccagatgcgttatagccttgttcgtacctccgaaggtttagaactgtggtttactcaacgcgcgtttattggtggtgttaaagttgcgctgttgtctatcgctggcggtgctgctactgaatattatctgcctactggttacacgacttctgcaactgctccggaagggttagttgagagcgtggctattcgtatctatgacgaaatgaacaagcctaaccttgacgatggtactgatggtattctgtctgttgctaaaggtggtacaggcgcaagtacagcctctgctgctcgcacaaacttaggtttgggtacggctgcaacccgtgatgtcggtgaatccagcggaaacgtaatggaagttggtgcatttggtcttggtggtacggtaggcgctggaaatattgcaaagggatctttagcagagaccgttaagtatcttaatacatacggaacatgcttctttagggtagaagataacattgctgtactgccccagtattctcctagcatttatgttaaaaccggaagcaatcagttaattctttcagctaaccacagaaacggtgttattagtgtcgtcactacggataaagttgatggtactaatttaacggtatctgaagtatatactacgctgaataagccatcaccggctgatgttaatgctgttgctcgtactggtgatggtatgacaggtgatctgtctattaccaaagcgtctcccggattccatttgaatgcggagagcggaaactcagtaatttggtttaagtataaagggcttgaaactggtgctgtatgggcgttgcctaatactgcctcttctggtgaagttcgcattcgtgccagaacgtcgggtggaacgacaggtggagaattctcgtttaaatctgacggtacatttacatcacctggtgatgtaaatatcactagcggcgctttcaacggtaaaagtgtcaatactcagtatgcgaactttaataacacaagttcatccacaactgaacaaaccgtttctattagtggttcacagcacactccgttgttactgaatagacagactaactcgaacttgtctatcgggtttaaactttccggaatgaacatgaaacgtttgggtattgatgtaaacggtgatattcgttacggtgaagcagaaaaccagacacaaaactcatggttgttgacttcggatacagttaacagatggactgttaacttcggtcgtgatattaacgttgctggtgtggttaattcaactggtgtgattaattcaactggtggatttactggccctgttactgcatatgatttgactggggtaactcaggatcttgatgctttaacattgaacaataccgaaccaggtcatattaaagtttatacgtgccgtagtatgggtggcggtgataacatcaccaacaaaccttctggcgtaggtggtaactttattgttatcgttgaatgtctccgtaaagtaagcgataccgattacactaaccgtcaagtattacgcgcgtcggacaataaacgcagttgggaacgttggttaactgttagcggtactgctaaaacctggtcaccgtggagaatgaacgttgttagcggaaacgatgatgatgtatcatttaaatctgttaccacgactacaggaaacctgaacagcggaaatgatctgattgttgctaacaacgctcgcgtaggtggcaacttagggttaggtggtgcttcttccacgaaatacgctgataaaggtgttgtgatcggtagtggtagtgctctgttagaaagtactgatggtcgcgtgattattggtagttctggtggcggtcgtgctgttgaattacgtcctggtggcccaactcaaaccaacaacttgatcaaagtaactgctaccgctggaagtggtggtgatactgcgatcgagtatgcacaaggggtgaaaattcgttctaataacggcggggcgttgattatttctgctaaagcaggtcaatcaatctatctacgaccgcaaggtgatacatccagcacaaacgaaacccgtattgatgcaaacggtagtatcacgattaacggcaatattaacgccaacggtacattaacttgtactggtggtgctgttaacggcgacttgactgtatcaggaaacgtagatatcactggaactcgactcaaaacctggggacttgaggttgatggcggcggaactgtgctcggtggaactattgatgttgttggtaaagctaacttctctaatgagcttacagccaaaacttctattaatgtcatgaatgatggaaatagtcatctgttcttccgtaaagcagatggtacagaaaaaggtcttttatatgtagatgacccaggtaacgtgactattcgtgctaagggtggaagtggccctacttggaacttttgggaatcaggatcttgtcaattcccaggtgctattagtaactttaatggtgttaatagtactactaattatcctggcggtggcaacggctcgtttttaaacacggctggcttaacaagtagatttagtaatggtgcttacgtttcactttatttccaagaatatgttggaaattatcatcaagctattcttaatgttaacggctatgggcaagataacagcttttatttccgg

SEQ ID NO: 28 - DNA, 166890 bp, Unknown
  bacteriophage strain capable of infecting bacteria of the genus Klebsiella
tttagcaccgccattaaatggatagctaaacgggcagatgtattctttatccatgagagttttcatgaatttgctatctgccattttaaacccggcttcattggtatatgtaccccaattatcgtccatcatttctaatgagcgctgaagcgatttacgttgaatttttaaaagcgtaatgttattctttaatgtactaatcattagtataaatcctctgagaataattcgttggcgggtcctgatttaggacgaacggtattaacttgacctgcatatgtagcgatgattaatgcttcttcacgtgtgaagtactcgccccactggtcaacaaatccttgattgtctccatggacatggtcagaaactaatttgtcacggaacatatctagaacgttcgccatatcaacagaataatgacgagtgcctggaactacaattgttccaccagttttcaattcaaaacgatttgctgcacaaacgatacggcgttgaagtaatcgtccatcccaccaatcagctactttaaagcagatttctggaatttcgctatttacattacacatttgactaacttctcgttgaaagttttaataacttcacggccatggtctgcacctttcttacagtctgcaattgtccatgcttcaccgttttggtatttgtgaagagcccgggtattaatatctttcacaagattcataatcaaatcattaatttcttgttcagtcatttaaagaatcctttaattttctgccacaaacttttcttttcacgaataccaatctgacgaataacaggttcaccctgcattttctctaaccattccattgagttaacagcttccgctaatggaacaaatttagcaagggccttttggtaattatctacatccatgatatgtttaccatctgcattgtagatagcatagcattttgtgaatttcttatcaatgtatccgataaagtgtccacggaaccatacatcccaacaatcagttggcatattcagattaaggtcaaccttttctacacaacgctgaagttcattcaatactttaaacttgttcattacagttccttaatagagcggatgatggtttcaatgttttcagcagtacgggcgatatctaagtaagtattgcctgttgcagctacacggcaagacattccaaggtcagtgaagtgtttctgatgctcttcagaaatcttgtaaccgaagatgcggaaagtacctttgttgttaacttcaagactacgaataccgaaggtacgtttttccagaactgcgatatagttactacggtaaacagtaagttctttcagaggtaagatatcttccatctcaccgagaagtttcatcatcaggtctttgtgctcattcatatcttcagtcagaggacgagctttacgagtattgcgtttcttcagaagttcaggcttgttctcttctgcatagataactgccgctttagagatgatgtcctgtgcttcaccagtgatgattaaaccgtcaccagatttctcgataagacctttcttaatcagaacgccgatgtttgagttaacagaacttgcgttcatggtttcttcaaagatttcacgcagttcagaagaagtgatgaaatcctttttagctacctgaaccaggatagcagcagttttttcgttcagagcatcttcggaagctttgatgatgtaagttactttagacattgtgattctccatgatgttttattcaatttgtttggtatgagactataatatcatctgctaaccagcttgtaaaccattttattctgctctctgaaaaattttcttcaaagagcagtaaaaatgttatacgttaaagatcaagaacttatcgccattctcaagtttaagcacccagaaatcatcatatacacaaagaacgacttgatactcttcaccgtcttcatagttactcgcttgaattacctggcgcataggatactcgcgattaacttcgaacacatcaagcaccacaatgttacctttgacatagtggctcagtcgagtgccatcagcttgagtagaaatataaagaatgtttttgatatcagattttaatgatgtaatcattttgttttactccgtgttgttttgatattgctataataccacaaccgagtaagcatgtaaacaactttgtgaaaataatttggggcattctaaggagggattttggagggatatagatttatatggaaggacctggagatgacctccaggttccctagattaactgaggagcaataaaactagacctaatactgcaattatagaacctataattaaataaaattctatcatagttcttccaggtctttcagatactcagcctcaggagttgtcttttcccagtacttaacctcttgggcaagacgttttgcttcctgagcgagtttctttgcttcatcatcagtgatgtgatagatgttcattgaaacaagtttttcagaatgttctttgaatagttcattctgttcaatttctttagtcaactgcttacgagttttgccttggataacgatgttacctgcgataacctctttgataaattgagcttttgcctgagcaagattaaatgcctgcttagtttcagcgattttatgctcgattcgtttggcggtgaatgtcttacggacttctacaaaatgacgaatcagctcacctgaagttttgaacttatcgttcagtttgccattctcgtcaattaccacaatgtactggctcattttctcaatgagtttaaaatccttcatgattttagcatgacgctgctcagggtcttcacttaaagcatagtctttacggaatttcaccttaaagccaaaaccagtcttagaacagtcatcatcataagtgatgtatcctgcatcttccagaggatcgagtactttctctacataagaagcacgttcaaacttatatggaatttcgctgatatagatcgagttccgtgaagtttctttatacacaccgtgtagttcaacagaaccgtcttcggtttgaacgatttttccattaaatttagggaactgaacttcaggttccataacttcgccacgaagagccgctttagtacattctaaaacagattcaaagctatgcggaagaatagaagttgaatatcctgttgcaataccacgaacgccattcagaagaacagtcggaattaccggcagataatacgcgggcggaacatgttctttatctttatgtgctggagcgatttctgtatctttgtagattttacggaagttgtcagaaatccgacagaaaatataacgacttgccgcagcagattgaaccaagcgagaaccgaagttaccttgcccatctaatagaggatagttgttattccacgtgtttgccatcagtgcaccagcatcttgggcagacgtttcaccatgatgatatcctaaatcagctacaccaccggcgacagacgcaagcttatggaatttttctttattaccgcgagctaaatcaagagcccgagcaataacaaaacgctgtacaggtttaaacccatcaatcaagttcggaatagcacggttttctacagtgtaaatcgcatactcttttgcttcattatcaatgatagatttcaaatcgcgatgacgaagatttgacgctttagccaaatcatcgatagaacctgcttgttttaatagagtgtcaaaaatatccattgtacctaccagattagtgagccgatttgtactataacatcggaaatgaaaagcacaatataaatcattccgtagatcattccatagtacataactaatagaaaggcggcagcaatagctgccacaattaggagtttcttaatcatttgtaaactcctacaattttacaaatgcgctcaaacataataaatgctgcagtgaacgcaatgcttccgattactttagtggtaggcacgaggccataccacatgaatgttcctgagcaaatcattagggccatcagaaacacatagcccatcacgaagaaggttctcattagtatttctgcaaagtaaagatgaagttatcattcagaatacgattcagctcagagtaggtctgcgcgtcacttgaatgctgacgagtaaacgccaatgcaagctgacctttgccataaccagtggtgagcggtttcattttattggcaggaatccagaacacaccgtatgttacacagtttgaacgaagggtacgacccaactgagaacgtccagaacggatatgagaaagaacactttcaaatcctgcctttgaacgctgtttagccacaaagaaacgagcagatgcaccaatataacctgctttgccatcattgaacatcaaaaaataaaatccttcgcgctcagtaatttcacgagatggagcacctgctgcccaatcaccgttacgaatagaaccaatcagttctgcaccagcgttatcgagatcagcaaaagtcataatattacgcatgttaatttcctcagttaattaaagtttattctccgatgaggggccgaagcccctcttattaccaaaatactactaccgctgtcacgataccaacccaaaatacaagaagacctgaagccaacagacgatacacaatgtgtcgtttcatttttgaccttcccatacggtttctactaaagatttaaggccatcggcctgaataatatccaccgcttgaatagcaaaataaattccgaacccgaatatagcaacaattcccagcgctaccgcaacgataaaagacagaacaacagttctcattaagttaaagcgacgatcaaaactactacgaatcattatattttcctcagatgaaagcattaatccagacgttaactaaatcccatgcgaaaacaccaatgaaagtaacgataaggcagaatactacaaaggtgttcttcaaaatcgtaagtaactttttcattttgttctccagtttagctaacaagattatagtatcactgaagaacagtaaagtaaaccgttaaatgcacaagttacgaattttttcttctaaggctttaactttatctatatgctcatcgcgagctgcagcggctccattgggatacaatccaccgtaagttgaatcgccattatcgcaagcaatgatagtataatgccaattcatagattcgagaatcctatactctttcaaaagttcagctttaatagaagcatttccgcgtttagctcgaagtgattttagctctaagtaactcatgttttactcccgttcagtttgtatggccatagtatcatggccaatcccggaagtaaacaactttttaaaatttgtgcatgatatacccgccagctccaactcgtgaaggttttactacttccatgaggtgttcgataccgccggcaaacattggtgtgtaccgtatgacattctgggacacttcttctgcaacgaatataattatacagtctgcgactttatgtttaaacatgggccctagatttattccacttccattagggaatagaccgtctttaccagtcgtaacattaatccatggcttatgatttgctcggtcatgaacaaagtgtgttttaacttcaactctaacaccttggtaatgtggatgagctaatacgtcccatgcccattcgtatggatcgttgttattatggtcaacaacttgatcgttcacgtatccatcgagaaaatctgctaccacatactctgccggtatagcaattctgcatcgtttaagaacgtcaattctatcttgagatggatcgatatctaagctatatctggcagtatcaatgatttttacttttgcttcaccccttagcttattcaaatctagggtaaatgtccggagttggttcaatctctgcagggctttgttcatcaatgccataaattcctctgatatgtaattcaccaaaataaacacgatcgtcgtggttacatgtgtctggttccacaacaaaatcatcaccaagttctacgagttcatcacagtgcaaccaagcatagtgaacatcaccttcatgtttaaccacatgatgacaaaacaccgtagccgcatgatgagtaccacgaagattaacaactttagaatgagatacgttaaatggattaatcatgtttcacccataataaaagaggagcccgaaggctccttataattagcgaagttctgaaccccaacgatcagttacatcttctaatactacataaccacatgtacgcattttagcatcgttgtaatcaaccgggatagatactacatcacgcggatgaactttaactgaaacaatacggtcagaaccactaccgaagtgaccgatgtaagatttagagcagacatgcagacctgcggaacaagtacgctgatcgtcttcatctacctggttacgcggcattgtaacagttttaccaggagagttatcaaacgtgtttgaagcacagtccatataagtggaacgaactactttccaaccaatgaagtgaccatcatcagtgatgtcgatatcgtttgcattaaggaaatcaaacagacgataaactgcacgacgagatgggttcagcatcaggttttccaggaaaggcagataacgtttaaagtcttcgccatcttccatagctcgaacgatacgctcagtcagaccggatttcagctcgatatctttatagaataaagtaccatcttcaattcggacgttaccttgaacgaatttcttgatgccttgttccaggttaatgtggtcaatagcaccagcgatatcaccatctacaagtttctgcagtgcagatttaaacccagggtgttggctatcagcgttataagtagtacggccttcggtaattgaaatgaatttggaacttgctgcccatttaaattcacgctcaactggagcttctactttagcaggaacagctgccgctgcagctcgagcttcacgctctttaaacacacgccgaatagtgtcacgggaaacaccataattctcggcgagctctttcttagtgtacagaccgtttttgaagtttttaacgattgcatctttttggatttcagacagacaggtaacagccatttattcacctttattttcagaattttgagtagaagctccgtcaaggagctccatgatttttacaatatcatcgacgagtttgctgtcagtccgccaagtatccaagacacttgcgatgacaggataatcatctttaaactgttcaatctttttatagaagattgtctcagcatcaccagacagtttattataaattttattacataaagctaaatcatcgttttcatctttgattttactggtacgacaaaccttagcgattttgtttaattttgtcaggaacggatttttcattccagacgcagtaaacttactcgacaagaaattcaatttatcgtaatgcgcaatatttccacagatacggtttccagtagcatttgacggcatgtactggtcgtagtctaccttatcaatacacttgatgtattggtcaataataaaccggtcaaatgaaagcaatccatcagcttttgccgcggctttcatagcacccggacgaattgcatagaatttcttaattccacacgcttctgccagagaccgcatgctcgcgatattcatattccaccaccaaacattatctgggaaagtgtggatttcatcacgattgcgaccgattgcataaccttcaagctcagcaatttcagatgatactaaagtctgacggtcttcttcccagtacccgtctttatcaatccaatgcagagaaacattaggagattttggacgtttctcttttggaccagtgtcataatcaggaagagcttttctctgggcttcaagttcagacacacggaatactacaacttcatcagtatccatgattttcttcagctcatcaatgacatgcaattcatcttcattgtctttgattactgtaatgtgtgcccagattggaactaatccagatttacacagagcacgaaccgtagcaatacgcttacccgctttatcatcaataagaacgaacgctttagttctatcgacaccgcaaatatcagaaatgtttacttggttatggcgatgccaagaactgcttgatactttacgacgagcaggttcatcgcatgaaacataaactgatacttcgttatctacataatatgaacgaattttatcaagattatacttcgcaacaacttgtttaatatcgcggttcccaatggtaataccacggctctgaagaatagagcgttccttagaactcagcttattgaactcgcgcaggaattcacggtcagattcatacgcttcaaacgctttaatatctgcggtaattacctcttcttcaagagcattcacacgcttctggatgttggcaatagtttcttcatcaagagaaagctcttcacgagatggagtaatgtctaattcgccaagagggaaatgaacataaaccttaccatagcgattaagtaaccaatctgccttaacatctacaccgctgatcggatatacgatttttccataaaccgcgtacagaccatagctttcatacgaactattaacgctaaaccaatcagttttatctactgggaaatattcaatttcacggcgaagagaatctacctttggaggtacagcaccaaatgtacgcaaaatatatgcgatttcataatgccaagtatcaatatcttctactttaaccggaaccgtgatttcaagaccagtttcttcgtcttctttcatatcatcgacaaacatcggacgaatagtaggttcacctcggtttttcatgacagtataaccggtggctttaccattatgatatgatactacgttaaatgtactcgtgtagctcagtggagatttagaaccaagaccaagagcaccgatgaaatcattactgttattctttgtggattcaaagaacgttttgtacatcgtcatcatgtcattatgattaagacctggaccataatcacgaattacaaagcgcgggtcaagacgagtaggagctttgatgtaaaatggacgattttcattaccattcagtttatgagcatcatcacagttagtagaaagttcacgaacaacagcacgaactttatacttataaagtttattcgacaaaatgtcaaaagctttacctgaagctttaatggtaaacgttgaatcgtcagcgtcagaagaaccaataattacttcatcatcacatttaattttcattttattcctatcaattgtgtcgtttaatgatttctgctacttcaaggagctcttcagcagtagcggtgttagttgtaaaaattttatcactgatttgtttaaagcggtctttgaattcctccgcagcttggacatcaaagaagcgttggatgatacgatactcccggtgaatagcatcgtcaaataattctttatttggaacataacttttctttagcattttactgctcctgatgatttaatcactttgaccatgtcagcaattttaatatcaggacgtaaaaagcgtatcacttttatagcaaaaaggctgtgattaatagggacactctggttactttccaaacggtcagctatagaatttaataaccgtttgattaaaagttcttggtattcattggagggatcgactgagtactttagtgcctcagtacggagtattgaaatgatagttgacttcataataatttcctcagaaaagaggggccgaagcccctcgggattaatgcactctgctaacgcggccatacacctcatgtttagaaccatctgagttttctacccaaatagtaacccaagtaccaggaagaggtttcttttcggcaaacatgtatccgtaatcgcctgagactaaagtaatccaataacgtcgcatagtaattccttctatagcagggcaatattacccgtactatttattcactcatccaggtcttacgtggagcagcatcattacccatgattaattcaaatagttctttccaattttcaggaagagtgactacatcataaaccgggtcttgaataacacgctcgtattcatcttcttcaagagagccaagacctttaatataacgaagtttccaacctttgaaatcatctttatggtcttcatattcaccaagagaatagaaccaacgttgttctttacctttggtaagaataataaccggagttttcacaaagcggattcgaccttgttcaaacaattcaggccaattactaaagaacgctaaaagacttgggaaaattgaaccaacaccatcaacatccgcatcggtcatgatagcaatatttcggtagttagtattttcagcaggctcaccaatcgtcaaaccagtgattgcacagatatcaaatacttccttgttcttcatagcatctgcagcagacattccccatgtattcatgaacttaccacgtagaggatatccaccatgcagttcacggtcacgagtagtaagtagataaccaatcgcagaatcaccttccgttaagaataacgtagtgtctgcgtctttaccatacttgttggccttgatatgtttagctaccttggctttctgtgctttcttagcagctttagtttcagcagctttttctgcggcgagtttgcgagctaacattgcctcaatgattggcatgtgaatatcttcagatttcataatagcgttagctagcttcttatagtcaatatcaatatgactacgaatttcaccccaaggagaagttagacgctctttagtctgagaatcaaatcgcatgttagacatatcacgaataaacatgataacagtcaagcattctttaattcgggctttgttgacttcaagcttgtacttgcgtttcaatgcaggaataagctcattgctcagttcatcaagaactaggtcaacgtgagtaccaccatttttggtgtgaatgttattaacatatgaaagctgacggaacccatcatctgagcgaccaatagcaatagcacaagtatcagaatcctgcactacagcattttcgtcatacatgtgggcgtaagctttaaacttgccttgaacccgtttacccatgaatttaaattcaatatcaggataaactactgctaacgtcatcagacgatcgtggatgattgactggtcaacatcagtcagtcctgtactttcaaagtgactaaaatctggaatgaatgatactacagtaccagtcttatctttgatgaattctttatcttttgctggatgttcttcccaggagatattttctgcgccattagaacaacgaacaatgatttcatttttaccatcgcatgttgcaccagtgaaagatactgaaaagatgttagttaacgcagaaccgacaccattcataccaccagttttacgctcagcatcatcgccaaagttaccacccgcacgaggacgagtccatgcagctactggtcctggaatagtttctccttcaggtgttactacaggagcctgcggaagaccacgaccattatctgttacaataattttgttgcctttaatgtcaactgaaatcttattcgcgtgtttgaaattagtacgaatagcttcatcaacagagttatcaatgatttcatcaataagtttgataataccaggaacatactttactgattggaatttaccaaaaagaaaacggtcatgcgcttcaaacgcagaactaccaatgtacattccgctacgcttaatgatatgttctcggtcactcagaattttaatttcgttcttaatcattacatttcctcggttagtgaaggaattatatcaactattaattatagcaagtaattcttctttgatatacatcaatttaccaagaacctcatggcctcctttaaccgctttatactctgggtatcgtggccgttgtcgttcaaacatagtccattgagcatcactaacgttagcgtatgcatatcgagaatttccgtagtactgttcaatccggtactcgttattttcattaagtgaaatccactcttcacagacttcataatatttctgcatccaaatagtacgaccattcacgtcattgattggccaccaagcaaacctgtattttccaatagcccgctctactatttttaaatgtcgtttagcacgcctttgcgcagttgtcattccaataatcataatattctcctctggccaacaagactataataccaaaacatgatgtccatgtaaacaactaaatgacccgaaggtcatttattcataacgaattgtgctgttcttgagaaaaagtcctgagcacactgttccgttaacgggtttccctgttggtccaatagccgtaaagcctgtgtgctgaaaatcatcctctgagcaagaaaagaacttatatccagtgattttgatatcagtaaatcccgcgttatctaacacgcgagttgcgttatcagcgtcagtgcatccaatcatcataaaggcaagcgctgtaattaaaatctttttcattttaatttaaccctataagttatattacctactttaataacccggatttctccgggtttcatggtaattcgtgctttagttcccatcaataatcaccactctttaatccatcgtagtgaactgccggagcagaaaccacccgcttcatttggccttcacacttagggttaaagcagttaacagtatagtcacgatgagaaattttacgcataacttctatcttttttccacagacttcacacttgtaatcatacattggcattaacagcatccttccatttttgtgttttgaccatgatttgctcattcagtgcacgagtaaccatcatggagatttcatcatctgatacatgagtatcatttttatgacgatttctgaaatgcagccaaagtgcatccactacacagttaataacatctgcgcactcgccttcaaattcttctttctgccgccatggacgattaatccaatcacacatttctccagtttctgaagaaagttgcaacatgacattcccaatgctacggttaggaataggataagacagttttgatgcttcaaaaataggagctaaatttaacattgatatgcactctgcagtgctgcaatagcagcgattgcttgaccacggttatgaatagaaagattcataaccaaatcggttggaattgcattcgcggaagttccaacttcagtaaagtatttgaattcgctatcaaaaattacaaggtcttcaccgccgacttcatcacattctgtgccattagcccacataattcctgatactctattattttggcggtcaactttagtaacagtaaaactcccaccattttcatggagttcataaacaaagtcttcattaacctcatagcgtgaagaaaattcttcttcagcttcatcattgacgaatttgtactgtacaccttctttaaaattcattacacaatctccatgtattctgggccatcaactgtgattacacgagcaaaggtacgaactgggacaatatcaccgtgattcgcgaatacatacaaccaagtccaatgctcttctttaccgaaggttttctctttctgaacgacgattaagtctgggttgaacagaatgtcttcaaaagcttcagcagtaatttttacggtgttttcagttttcatgttattctcctcagtagttgataagataatagtaccacatccttgtggtaaagtaaacaactttttaaactaaacctggattttgtgattctgacacttctacgtcttcctttggaaggaccgcaaagttcccctgaaaaactacgtttactaaggttttaccgtcttcttcccactcatcggtgacaagaacattttttccttgacttagattttttgctggattttttgggtctttggattgagtgacaacatttttaagggttttaacgcgaacccacttacgttcaaagctttctttaacattgttagtgtctttaaacttcaaatattttgcaggaactacaaatttttctaagcaatgaatataatcaccagaatcagaatgaattttataacctgctttaccatcattacgattagcaactttaacgatcacaccagtatgaccaacccacttgccgccagtaacttctacagcatcgcctacaatcaaatttttcatcgtgtttctctcagtttgttaatgtagagccattatataacggctctttcataaagtaaatagttatcggtgagaaatttcgcatccaacatcgacgccgaacagatacccagcttcccaccctttagccatcatagccttggccaccagaaccatcgttggagagatttccgggaggatttcccggttgaaccactcttcgaagttttcatcgaactcaaactcttccattagccacgccccttaggtaaactcaaaggatcggtatcttctgggcttggtgcttcgcttaggcctagagcatagcgttgagcgtatttaagcattagaatatctttagcacagtcatggatactatcatgcgcgataaacccgtcgagcgtaccctttggaagaggagtagttgtcaatccgcgtgtcagaagcagcgattcaattgcagtacgaatatcacgttgattccagaacttgcatggttcttctttaaatgtatcaatttcttcttcggaaattccttgagctcgttgaacatcgcgaagacaatcaacaaaaattggaaagtcaaagctctgtccacgacaccagccaaaggaatcccatgggtgaattccattatcaatcagatattgctgggcttctttaattccagcaattaccgataaatcgtctggcgttgaggccaggttagcccgggcttcagctgattggttcttccaccactcaagagtagacttgccaaacaatcgatggcctttctgagatttcaggtcaaacttaatacgatgaccacgtttaaccaattcatcgaagctttccagaacttcggggtcagaatcaaaggtgattagagcaaggtcaatcacagaagagcttgacacatttccgaatgtttcaaaatcaataataaagtctttagccattttgagcctctaacataaatttaatttcgcgtaactggcaaccaatatattcgctcagatacacctttgggtcatatcctgtgaaccaagtaatagcattagcattatccgctatatcacgaagctcattcagaactgtatcaattttaatgttaatagcacgcttaacattgtctggtgcttcaaacttagattcttgtaagccaacaatcattgtttgaaggtcttctaatttcaattcaaacatattacctcacacatagaatacatcataacgaccacgagtagtaccaacatataataactgctgtgcgagagaagcatctgccatgtgaatgcatggagtataaatgaagcttctgtcaattgagatgccctgggccttatggaaagtcgaagctggtaatgctttcactttatgaaacttacgcttagcatcccagaactcagaccaaggagctttacctcctttattccaattcttatatgtatctgcagtttttgccaggaagaattgaaacttattcatttcttcttcggatgagatgacacagattttctctctagcgtactcttcatcatcgccataggtttcaatatctaatacccaatgacgaaccagatattcacctggaacacctctggcacccaaaaacgtggtggtttcaactgcgtctaatatgcgaacaaactgaccattattgaaaagaatttcgctgaatttcttcccctcaaatttaagttccttggtaagaggttcttgcataacaacaatctcacctactacgaatggtcggtcagtttcgtatattcttcgtctgattatttcgttcaatttatccacagatttattagtgaacgcaagcattctgttttcaaataaatcttctggggttttaactaaattaaaataatttagcataaaatctttaagggcagttcctttcgtaaaaccacgtacaccatgaccatcaactacacagtcacgaatccatccaccatttctgatttcagtagcgacttcaatgattggggcattactccgcatcacttcggtcaaatgaagttgtaagaaatctttatgagtgaagaatggactcagtgcaggttcattacttccaggttctaccggacgtatctgagccttatcaccaatggcaatgacaatacaccaggcaggaatagttgccatcaaaatcttaaacagcttacggtcatacattgaagcttcatcacagatgagaactcgaatagatgccatatccggaactttcttttgttcaaacagaacgttttcttcatatgtcgtcgggttaattttcagaagactatgaatagtactggcctgcattccgctgagcttagataaaacctttttggccccatgcgtaggtgctgccaacgcaatgccagagataccctgagaaatcaaagcgtcaatgataaatttggttaaagttgttttacctgtaccagcaggtccattaatcgtaatatgttgacctttagctccttgtttgaccatttcaatgactttattaaaaatcgctttttgactttcttttaattggtcaaacgtaatcatgccacttttaccctcactacatgtagatttttaatttttgcttcgagtttttcgcgctcaacatcgctaagtggttcatacaccagctcagatgttttccaccaaagcatccctttggttttgcttttcccagtaaaattcccttttgctaatttgtctgttaaaaccgacattgtacgaatccgtgctttattagccgattcttcattagtgaagaccacacatcgttctccatcgtacatatcagttgtgactggatggtcaaatccgtctttatccttatacgctactacatatccatagtgttgcattacattttacctctcaaaagttggaagaaggacgcagtcaatggaagaccttttttcaattttaacttatctagcattgagcatttttctaaccgacgaagtgagttaacaattagctgtattgattgcacgcggatttcagcatctgatggacgattcggaactgacgctaaaatagcagataacttacgctcaactttagctaattcagacttaccaccactgatacgagttctcagcgcattaataagttctaaatcagccgaggttgcagttccgttcttttccttttttacaaattgagaaagatgattttcacgattacgcaagttggttttaattgatgcgatagttttttcatactcgctaatcttttccaagcgagacgcttctttatcacttgtaggtttaacagaatcagaagagcgaactatgcgtgccgcaatttcattcgcttttcgttcaaggccttcaatcgtattatttccacgcaaagtattatacttttgcttaacaggaataacattccccattacatatcccaagtcattattccaacgctcgagcgtcatgctgtcaggatgatttcctttaacagttccaaacttttcgcctgagtatgcacagtgtgtctgttgcatgatgttaaacagatattctggggtgagattgaactccttgtgccgacgttgagcagaacctaaagttgtaattaaacgagtataaactttagcggtttcagcagtgaatttcattatgttttcctcaaaaatgctttcgtcttacggacggtataatgggtctaggtccctagttctagataatcactagttgactaagctatagtaacactaaagtagtccataagtaaaccagatttttcaactttgttatgacccaccactttgaacttagttcccatcggtagcatcctttcttgttctttatcaatcatctcgatgtcagcgcttctgcgctgagcaatgttatcaatcacatcatttggtcgcatgaattcagaatctggtgcagtaattaaaagcgatttcatgttggtatgataatcaaatgattgctgacaattattgacttcaatgactacaaaggtcgagtaatgccatttgcctgcaaattctcgggcaatcgtttcatctgttgtgaatgatgctacctttccaaagtcaaatttctctcctttaataagagcgtcataaaaggctttagcctcgcggcatgatagacctctatagagaatgtcactgttatcaatttgatgacgtctaacgatagagtcaagtttcttatgaaattcttcgccaatcttattgttcatgcactgccacagaattgactgttctttgcagtcaaaccgattggctaatgcttcccatgcgcttaaatcatacacaggtaatcctctgtgctgcctcacggaattcagaatatcaatagaatgaacgctttctactagcatagcctgtgggtttaatgaaatagccatgatattctccatttttggttacgagaggtatcttatcatggctttttggaagagtaaactacttttgtgaaattattttgcccatggagaccagggcggcgggtcagaccagattgaagctagttcatctagaagagcttctggggctttaataccgtacttctgtataattatacggtattcgtctttgatgtccttagaaatcactggatgaacttgaacctcttcctgaggctcttccatcatttcaaacaaatccatcacatgaaccactcagtattgcgatacagacaactactgctgttatatccatcagctgctttttgtaacagcgggcttggagcaagtttgataaaatctgcacccatatataaccaaactaacttagtaaattctattagagaatctgtgctatcaatgataatctttttgcctcttgaaattatgtcattttcgtattcatataagctagtttcatgacatacattggtgtatcctttcaagtggagagcatgcagtatagaaacaggacttcctggaactgtatctacgtcaaagacatgagcagtcttaataatgccataatcttcagaaggacaccaaccaaacgcctcgaatttattaattaagtctttgaaatctttgtcaaaggtgctgtatagagcaacagtaaaaattctatcttggtctagacgcaaagctccttttgcatcacttcttgattgaactgcacgctgtaaacttactttatagatttttgcgtttgccacaaagagctccttcagtcatgttgttgtcttcaaaccacttatcatttgctttaattaaagcaggcgcagcttttagtaataacgctgcggctcttacacctctgtaccaacaatcaaaatgagacttctttaatgacgattgataccaaggcttagtataacatatcattttcttctcctcagttagtaggaataatatactattcccagtatagcataaaaggactcccggaggagtccttaatttttatacttctgcactagcttcaaacattttagcgttggtggttgcccaagttgcagcatcatcaactactgttgaataagcagctttttcagatgggaaaatctgatactgcgcgttagcaatacggtgcgaatcagaatataccttaaaagctacagatacttcagtacctttaacttcaccatcagcagttgtatggtcaaaagttttgatgtttacgtaagccattttaatctcctatttagtttacaggagtatttatatagctgctgtaagtgcctttaatatttctttatcaatttctcgagtgatttcttctcgaagggccaatactaaggccctttcttttcgttttctgataatttttaaacgacgcttagatattcttttagccatcagtaaccactgtcttgacgagcaaagttctctgcgtttttcagataatacagcttaaagatttcttcagaatccagaccaagcgccataaacatattcagaacaaagtgcaggatatcaatcatttcaaacttgatttcaagctggtctttatcagacaggtctttgatataagtttcctgcatcttgacgtggtcagctttccatggtttccacacagcactagctgccttttcaccattactcataccgccaagagacgtcagcagttcgcggaattcgtcatcaatgtagtctttttgattacgcagccactgcacgatatcaccggcttgagccaattcatcaggatgcatgttagtacctggcttgtcatttgcaagacgaacctgaagagatttttgcatatcaagcattacttgcagagggtcaccaccaactttacggacgatacctgcgtatcgagcttcagctttatctgcaccagcgatcagttgactacattcgttaaagtgtgccattattttattcctttcaattaaattagataaatattatatcacttaacataaatagcaggaggattcatgtctgaagtgaaacaagaatgtaaagacaaaggaggatttggaagatatctttacgtcggaatcgccactgctgctttagctgcatggaattatgtggtagttccattagctagcacgcacgggctagttcttcctccgatgccgttagaaaaagttgtgtcgtttattatgactggaggattgctttagtttaaggggctttggcccctatatcttcgcatatttgtcaagacgtaatttagccattaaaccttgcgatatattttgattaatataatccattatttcagaagcagttgccccctctttcataatcatatcatttatatctttgcttttccaaggcgacttatcccagaaaactaccttttcacctgcatctactaaacgtttcatacgcttaattgtatcaggatgacgaggttcatggtccataatccatgctcggttatcatgacatggaacttgagctaaatctaaagacccgccagtgattgcaatagcattatcaatgaacaacgaatctattggtccttccatgacgaatacgagttttgactcatcaatagtgtcgagaccataaattttggtcgcgtgttcgtgggctttgattgtgatgtatttttgtggagcattctttcgtagtgctcgtccttgaaacgactcaatctctcctttcttgttgaagataggaataaccaaacgtggttcgttcgtctcattcttataggttcctggattaacggagttaacaagagaaggccattggttagtaaaccataaccttttccaagaagtgcttggaatacatctggcagtcacgtatttaactatcggatgttccttaggaagtctatctaatcgctcgcagaaattaagtttttctattacggggagttttgcattaattttctcagacggttctacagcctttggcttatcaaagacctgctcctttcttttctcaagaagatactctcgatagaggtcaggttcattatctttaagatactgcgatagccacttgttatactcacagttgaagcaatggcagcgtaatccttgacctgcatcaaaaatccagaatcgggctttattgatatctttctgtgagtcaccacaaattgggcaacggcagtttaacttgaatgttgaagatgtagtaacgtgtctaaatttaggtaggtgagatattgcacgaattgcatactcgttatcaacccaagacataatatttcctctggccttaaactaataaggccattttatcactttttcttggcagcgtctttatccgcttttcgtttctttggaagggtttcgggtcctttattgacgatgtccccggaagtggtacctgatgcaatattctgtggattgccgccagcatcacctgcgaccatctcagtaacaaactctttgtatgttttcatagagcctcctactatttattcatgcgtaatacgtaagcatttatatgtaggatacagcgtcggagacattgattttggattgtctttgataagcataaactgcttgcctgtatcttcacacttttgcttaatcacggcttcatctttaccagtgaatgccatcttttcagtagacattccacctgaaccagtagatagcgccattattaaaacgtacgtaatcatcctaaaatccacttaacgatgttgaagttatcaaactgagcatcacagtaaagaacataattcaacttaagtgctgcgccgtcgtctttaagttctgcttgcacttctgtttgtttgctcgggtctacgttttccacaatatgaccaacatctgcacgaatctgctgagctacttcagactcatcagcagtcattgaccactcgcataagtctttatcatagttggccatagcaggaactgcagagcaacttgatactgcgaacactaaagcaagtacaatctttttcattttggtttcctcaagcagcttgtacgttaagagcagaaatcaggcgataatcaccgtttgcgtatactaacattgacacattgccatcagtgtttttgaatggctcaacaactactaaaactgtatcgccttcatctaatgcttttcgtactacgccatcacaacgcagattagcatatggagatttaactactttgcttccaactaccataccacaatgcggtacggtttccgctgattcatctttattcttaaagactacgtctaatgctttttcaattgtccacatgatgttttcctctactcgttttgtttcagtaaggccatagtatcatggcctttgaagaaagtaaactaccttttgaacaattttttcaacaaaatgtcagaggtcagattcttggtaggtaggtatgtagcagagttaacccagatgccatcgctgtcatacaccttgacctctccatagtcgcatacagataggtctgctttgttatatgcctcaatgcctcgatgaatggtatctgtggctgttacaacaaaagagtgacctgactggtcacggaccgcgctaaacacaaaaatcataaaatttacctagaatttcaactcttctgccagagcatcaagcttagaacgtgatactcgttcttgacgattagattcggctacacggttctgtgcaccggcaccttctcggacggtattgcttggattaggcttagttgggtcgttttgcttctcaatttctacccagcgttgattagccttatgcacacccataaagaacttattgttgatgttcttatcgccataacgtgatttaatctgcttaattaactgttgcttcatctgagcaagttcaggggtttcaatcacagctaacataaagtctgccgtagcaggtagacccgcagattctgcaatatcactcatgtccatatcagaagcatcccaagctgaacgaccgacctgagctgcggtccaaagaacagtttcagattctacagccaatgcgcgaagttcttctgcaatagctttaactaacgtgtaactgttttcagtatattgacgaatacgacaagaagcacaaataccaagatagtcaatgatgataatagtcggtttaaagttcttcttgagtttcaactcattcagaagagctcggaatgtattagcgttagcaccgccagtcggatactgtttaatgattaaacgaccaagagtactagaactacgccatttttccatcttgcctttatattcagcgtatgatacacagccatcatcaatatcgtcaagtgatacatcaagcaagttagcatcaatacgtttagcacaaacttcttcggccatttccatactgatgtaaagaacgttatgccccatctgaagatagtcagcagctaaagaacacaatcctaacgatttaccaacgttgacgcctgccatcaatacgttcagtgtaccagtctcggcaccacctttagtaattttgttcagaatgctaagtttaaacggaactttacgagctttattctggtatgataaccaacgagcttcataatcttccatccaatcatgaccaatatagctatcaaacgatactgataacgcttcacgcatgatatcaggaatagctcccatatcaggaagacgcttatctcgcttatttggctcaagctgggcattagcctgaatttcaataattcgagacgttgcgttatacatagccttttcttgaacgtacttctctgtttccttaactaaccaattcaaatcttcaggagcatcagataacttatcaataagtttctttgcgccttcatgttccgtttcagttatagacgaattatccagtgctacacataaagcagtctttgaaggaattgctgtgtattcattaacgtgtttcttaattatgttaaacaccgtctgagcaggtccttgctcgaagtactctttgtccatatatggccaaaccttcgtaaagaaagcctggttgtaaatcagattagctaagattgtttctaccactttaacctcttaaaagattttccataatgattttttcttggtctttaatgcactctggatttgttgtttaacacaagcttccacatgaggataaagttcatccttatgagcttcagatggagtactaaactcaatagttacttccccggaaggagaaatatttaatttatgaacataaaccaagtgtgattgaccatttaattttatcacaatttcttggataacggtcttcatagcttcttggattatttcatggcttttcttgaacactcgttcttgacgctcgaagtctccctcttccgagggagattcttgttcaaatttctcgagttcagattctaaatcaaactcagtcttcattcatgaagttctctaattcatcttcaacttcagcagctgatactgaaccactctcaggaagtttaacaccatcaaccttagttgaaacttttgagttaatcatttctgctacagcttcatcaaccgcagcgtttgaatcaatagcacccaactgataacgagctttgatagcgtcacggaatggctcatgcttaaacagaggaccccaaaattccgtactgctcgtatcttttgcccgccaggatttttcttcacgaatcatctcaccggtttcaacatccaggaattctcgtgcataccatccgtttttcggtttaaccacaaacccgatatccagagccatatcaagcagaccactatatggatcgataccgccatcgaatttaacatcgatgaagaacttacttttctctttgacagtacgtgatttctcagcgttcaggacaaactgatatccctcaagctcagtaccatctttaatttgacgtttaccaatgatgaacacagtatccgcagaatacataggacctgtaccaccagtcattaccgtcttactgaacatctcgatagtctcgattgtgtggttaaccgcgacacaaggaatgttcttaatagagaagtaaggagttacgatacggaagagagacttcagacttttcgcacgagtcatatctgcaacagatttctcgttcagtgcatcttcggtttcctttttagacgccatgttaccaatagagtcgataaacacgatgactttttcaccacgctcaatagcttcaagctggttaaccatatcgatttttaattgttcaaccgactgaaccggtgtatgaattacacggtcagggtcaacacccatagatttcagataagctggagtgataccaaattctgaatcatagaacaaacagactgcatcaggatacttattaagataagcactaaccattgtcagagacatgttagatttgaagtgtttagatggacctgcgaagatagtcaacccagactgcataccaccatccaacgctccactgattgcgatattaagcatcggaattttagttctaactacatctttctcgttaaagaattttgatttagtcagttctgctgtcattttagaagtggatgctttaatcaggcgagattttaagtcagacattcattatattccataagtctccattatatttttctcacaggttaaaggatagagtaattatattactttgttcttgaagctattaacagaagttccatttcttcttggtgttataaaccactgtttccatatctatttcatagtgtattttacatccaacgcacatgccatgccaccagcaatgcattccatctgagccagtagttccttcatgaacaaactcatcagatttacatacgaagcatctgaattcttcagccttgaatatattaccagctacatcagatttatcatagatgttcataagaggtccttggagggctttcgccctcacagatatggttctaccttaccaaactcatggaaggcctgagatttcactcgagtgttaatacacatacgaattgatttcagaggttcgttatcaccgaataacccacgtctttcgccgtctttagatttccaacgggcttgatttgggaaagcagcatgtagttgttcaagggctctattctgtcgagctgtatcacgctgtgtagaacaaccaccaggagactgcaccttaccagatttaacgaggtacttaaacagagccagatgaggatgacccatgttaattaattttagaaaagcataagcatcttcgttaaggtcaataactccgtaaccaatatcttctgcagtaagtttagtcaaatcgtagaaagtattagtaaacccaaagctgttctcgcgataatgaccccagcttgatgtgattttgaaaataggcaagcgagcatgaccgtgataataaccacaatccatagcagtctcgacatatttgaccatatcatcaaatacttcttggctcattgcctcgccgacaccaagcggaacacggcgatcgtcgcgttcacgaatttcagtcagatgaattgtcgtatcatcatcaagcatccaaattcgctgccctgcatacatttcagtaatcagacggcgagtaccagcgattccatcaacatcatcgggaatagtaacaattttagcagcatgaccatgccaggtttcgtatgcttctttttctgattcacgtactacaagatgtggaacataaccttcaggaaacatagtcagggcagtaactgccccggcgcgcttataacttggaattacaaactgaatcatttccattcacctttataatctttctttgcaatatgagtttcaccagtataagcatagttatctacaagatagaaatgacgctcatacacgtgcaaagacccgacattccaaataatgtcaccaactgaataatttttacctgatgcattcagaagtttggttaactgttccagaacatagagctgccacgcatagtcattacgatatccaaagactacatcgtttgagcgcatatttaccacggcgtgaactttgttgtcacgaataagatattgtacattgttagtacacatgaaatcgctcatgccatcacgctcaaaatcatactgcatttgaggtcgtgtataaatcataattccgcggcgagaatcaggattactgataagttcctttgcacagttagcaaactgcgaatagttttgtgatgaccaaactgcccagccatagttagaattaatctcaccatgtttggatgcaattgctttccaaatagctggggtttcacctggaatatctttaacgaataaactttgagatttataccactcaagttcccgagcaatatatccatcattaactgcgccaaaaattaggttttcatctgcaataaatgatgcacctatgatttcaatagtcttcacacccgtcttatcaatcacaaattctttgttgagcaaagcatcagcgaattcttgacggatatcttgtactgtcattggagttacaatcatgagacctcttatttaacttgctggataataattgtattctgctgtgcgttagaagcagaccaaatcagcgcaattaaccaaccgataatggaccaaccgaatactagatttgtgataaagattccaccccgtgatttatgcttacggctgcaagctacaaaagtaggcagaaaatagataaagataagaatgattaaaccaaatactgcttccatttcaagttcctcacttagacatgcatttgttgtagatatgattttgaagagatttcaactgctcagtgcgttgatgatattcattataacttaatccaccattagcaaaatcagttaaacgaatctgatcatttaccgctgctgcctgggaagcgcaggtacgttctttttgagttttacgtaaacgctcgatttcggccatttcatgcttattctgctcaatcatgtcgagttccatcgcagtcaactggcgatttggattagccttttctttagctaaattacgctcgaactcacgagatgaggcagagacctgattgtttgtacgatagtatcctacggtacctccaattgctcgtacttgtccaacagaagaagcagggacgatatcgccttgtggcatttgacaaccggtcagtgtaagagcaacgataatagcaagtaacgatttcatattaatctcctcagtaagtttgggtaaactataccacatccctgtgataagcatattagaagtcgaacatgtcgagaagagaagatttctcttcatagtccaacccggctgcttcggacatacctgtcagaggtttaacgaacgatttttggaacagaacactatggtcaagccataccagaacttcctgtcggatttcctgtggcagttcagtacccgacggccatgccatacatttctcaccatacgggttaccttcacgtaacggaatgaccatcaccttctcaccttccatgattggtgtaataccatcaaatcctgcagttgctcggttatatgccaaagcacctttaacgtgatatggagtacctttatctggatatcctgcgccatcatcatacttaccgatgttgttggcagtcttaacttctgcaattaccttatagtcaagttcgcgatattcagactcgaactgcttatagtactgttgtaaagattcttcaccttcttgcagcatacgacgaatagattcttccaatgcattctgaacagcagttggtgtagaactttgttgagtttccatacccatgattttcagatgcggttctgcatatcgagtaccttccatatcatacacgttcagagcatatcgtttcttcgctttccagaatccgccaatgccgtttgaacccaacggaggacaagaaatagcttcacggtccatgaacattaaatgttctttattgttcatgtattcacacatctcacgatatgattggtcaatccaaggttccattttcttcttgccgaattggttcaggaattcgaccaaatcgttagtttctttgaaacgctcaagacctaccttctcgataaccttatcaacacaaacgtaaattgagtcagtatcaccagctactacaaacgaatgtccttcggtgccacataccttgttgaggtattcattaactttacgttcaatccattgaattgccatttgaccaaacaatgtgattgctgatgcgttgcgcaaatcataataacggaagtaaatgttacccaatgcaccataaagtgagttgatcagaatcttacggtttaactggttagtgttacccaagatttcagcgtgtttacattcaaacatcagtttgtcaagacactcttcggtatatgtcagcagttctgctttcatatcatcagagaaatcttcatagacattaacttctgcgaatttatcgatagttccaaacttcttatcattcagaacctttttaatcagttcttgatttcgtttggcacccatcattttatttttccactctttacgctgataaaataccttcgcgatttcaactggaatgacaccatctacatctttacgatacatccaaccatttggtgaacatgaatattcgtcagacggacgaggagcagtcttgttaatgtactcacccaatggatgaagtttaaactgtccaacgatagtttctggtgaaatattgacttgtcgaatgattgacggatacagagatgtcaagtcaaacgacatgatataacgatatgcagcaggaactggttccttaacatacgcaccaggatatgactgtttaacatgagaacgactttgcggaataaccttgtcctgttctttcagactgttaaagatgattgcgtcccatgttttaattggactcattacaccttgatatggcatcttcgcataataagacatcgagatagccaggtcaataaatccacgaacagcatcaatcgcttgtactgattcaacgtcgatgatgttatacgaaatataccgttggtggttagtttcacgcaacttattgatcggaccgtcatatgctaatttacctttcttggtttcataataagcaatgaaatccaacttatacgtcggttggttcgtgaaactaaatttcttatacaaatccatgtaatcaagaatagtcacacccatgatagaataaatttctttatcaccatacatgtttgtgataatcttagatgaaactttattcagaggagagaaccgtttcatcgcacgctcaccaagaatctgtttcacacgattcatgatgtacggaatatcaaatccttcaatgttccatccagtaaagattgctgggcatttctgttcccaaagattgatgtactcaagcatcatttctttttctgaattgaacggcatatatactacgcggtcaagaatatgttgtggaacttcatcaccgccttcggaatctaaacgagcagcgagtttcttgtcccactcggaaacagaaccataaagagaatgcagtaaatcaaatacgtagaacttatcatcaaccgaatcgtaatgagtgatagcatcaatttcatattctgctttcatcgggtctgggaattgagatgcagtaacctcaatgtcacagtttgcgattcggatgaattttttattataaacgatttctgaaccgtaagtatcactgatatacgcgagtttgaaatcatccatacccattgcttccattcccatatcttccatacgacgcatccaatcgcgtgcatctttcatagttgggaatgtattcttcttgcaatacttgccatagatgtctttgtactttgtttcttccatgcaatgactaaacataacaggagaatacggaacacgacgcatgcgttcctcaccagtagaatcgatataacgttctacaatgtcattgcctagagattcaacgctaatataaaattctttcatgggtttcctttgtttatagaccgagttattagtctttaggtgggataattatactccgatttttataaagtaaaagggccgaagcccttttcttacgcaccgattgtgtacttagattttaaagtccattcatgcttctgtttgaatgtaattacccggaagttattctgcatctgggcaagagtttgaccacgattaatacttagtagaccccagtcagcgagcagttgtgcgattgagtctcgacgaatttcatcttccaaatcaatagtaacaggacgaccatcaagctttaacatctctttaaaatggacgatatagtaacgaccttgtttctgaagaatgtggcagctttgatatagtaccttatctttgttattagcaattcccatacgagtcagagtttctttaactttcaggaagtcttcaggctgtttcagtgtaatttcaatcatctttaccattccaatgctgttttcttaagagttttctgttctttcacgtttttcgtgattgtcttgaccaattcatcagtcacaagacctttcattttcttgagagcaggtttaagcttgtttttagcttccagggtctctctatacatcctagcatcaatcgcattgaccttgtaatatgtcattataacttgaagaatcaatgcatcctggatgttttctgttaacttagcccatttcccataccgacgacctctaggaacagaggccatcatatagttatagtgtgcttggtcagataacccttgaccaacaaggttcataacataaaccgaaggcatacagtcagggtgttgagaaagagcgttttcaaccatgaattttgaataatccatcgtcgagatattcaaatgctcttgcttttcgttaatagacccgataattgtgaagaattgattttctgctttttctttatatgaatcagataattcctggactttcgtccagtctttacctaaccacgctatttggtgctcgttatactgatcatcatcttcaaataaactcatcatttccactgcatctctacaacaagttgaataagcatataaaccaaatgtaattcaatcgaagctgctatgccatgatactggttattttcaccgatgatttcatacattcggataatgcttgggccagtaaccattgtatacagctcagaagaaagtttatctacaaaccaagtatagtctgctgcatatttcggagcaagagcacggagttctttgatgttcttagttttaatagcttcgatgacatcttcaattgaaccacggtcattcagaacgatagacaagatacctgcatcaatcacacccttagaagaataatgatcaagcatgttaatggtcttacggaattctggaaaattctttttgaccaaagcagctacaactttcttatcttcaactaccacgccttcattttcacaaattgcgagacaacgcttgagcatctcgatttgcattggcttaacatcagatggagatggtttaccaaaattaattacacggcaacgagactgaagaggtttaatgataccgtcaagattgtttgcagtaatgataatagtacagtttgtgctatacgcttccatgaatgaacgcagatgtcgttgagattctgcaagacctgcacggtcaaattcgtcaatcacgataattttctgcttgcctgcaatagaagcagaacttgcaaatgcagttaacggcccacgaacgaaatcaatcttacagtcagaaccattcacgaacatcatttcagcattaatgtcattacacaatgctttagctactgtggtcttaccagtaccaggagaagtgctatggagaattaaatgaggaatttttcctttagctactaaagccgaaaaaatttctttatcttcagcaggaagtacacactcagaaatagtacctggacgatatttctgttcccacatgaagtctgcttcgtttactgtcaatttcatttatatttcctcattcagattaaagatggggccgaagccccgaagttattactcaaaatcaaaggtactgtctgcttccattgctactacataagaggctgatgcaccttcaaatttcgctgcagtctgtttcttggagccattcatttttgcccacagcatcagtttataatcgccgatagtcatcttcatattgctcatgttgatgataaagttgaagttaccgtcaccttcataatcaccgagtgtcagagaatacttcggacgggtcagtgcagcatcttctactttgttataaccgcgcagaacaattttaccatcaacattggtgatagcaattgtgtcaatctgcatgccacgagatactcgcatcagctgctgcaggtcttcacctttaaaatcgataattacatttgccaccgggaatgggattggtttagtcgggaacacgattgtgctcgggtcagctgctggccagaagatagttgagcgagcatctttaattgccagattaccatcttcctgcatgataatatctgcatcatcaccaaccagagacagaatgctcaggaaactgttcaggtcataaattgctacatcagtatcgatggtatcagaaattgttgcttcagcataagtcgtaccattaacagcacgagtcatgataaaattgccaggtttcagcatgataccggagttgatggtggagaagtttttcagaatattcagagtttctttagagaatttcatttcaataccttttaattaagttcaggataattatatcaagctgcgaatgtagcagttaattcttctgcaacaatctgacctgccgcaacgagttgctcatcagcatctacacagtaatcattttctagacgttcgccaccgtgacgatcagtaacaattttggcaccagccttgattgattcattgtaatgcttacgcatcagttcaatccatttttctgcgacttcatcatcgatagatttatagaaagcaaagcgagcttcggaatctttaatcttatctttgatagcctgtttaatttcttcagttagagccagaacccaagacttacgaatacgattttggttattcgggttggaatctgcacgtacgtttttaacctggatatctttcacatcaacaaaattaatcattatatttaccttaatcgtaataatcttcaaccatccaaccggcattcctgttggacatgactctattatattcatttcccgtaaaagcatctcgtaacatttcttcagttacaagatggcgttcatcagaaaataaattaactaacacatagcgctttaattcaggaaaggccaacagatgttggcccgtagtaaactcattcattccatcaccgtgaatcgtccgaccttcttcatttgaaggtgttggccatatgcctgcgggtcgtggtcacggtgagaaataataaacacattggcatctaccatcttattaagaatagcagttattgccttaacaccttctgcgtcggtggccgaatcgtagacttcatcaaggaacagacagtttattttaacaccagaaactttttcagcaatatcacgccatgtgaatagtaatgctatatcaattctggctttttcaccttgactaaacgaggcataactaaattcttctcgtccgcgagatttaatcgtttcagagaactcttcgttcagtgtgaacgaataatcagcttccataatttttaggtagctgttaatttgcttattgaacatcgggatgtacttcttgatgatagctcctttaataccggagtctttcagcatttcagttaaaataccacgacgatatttttccataaccaaattagttttgacgaggataattttatctaattcttcttgtagcaatttaatcttgtctgagttatcaataaactcctgggatgctttatcaatagctgctttaatacgacgtgccttttccacagcagtgatagtcatttgctttaaactagacatttgagttttaatatctctggcacgtgaccggacagtgttatactcgcgagctagttcatccagttcactctggcgcgtctttaactcgccaagaatggtattacattcttcaacatgatgattaatcttagtgattagagtgtcattagaatgcaaatcctgcaagcacgttgggcaatgaccacctttatcatacaacccaagaacctttgagtatgattcaattttagaacgaatcttaaaggttttaccttgaacttcttggattgactctgctgggtcatcaccaatcacgagttcaagcagttcgctttgaagagtttctaattctgctttatatcctcgtgcctctttcacttgctcatcatacatcgcctgcaggcgagctacgttatcaccagaaagtttcttctgcttttctgcatactcatgatgagttttaatttcattagtcaatgcttcacgctgaacatcattaacctggatttgctgattgatttctcttatctgtgtcttgttcagtttgtccatatcagccaaaagagacacttcaagcaaatcttcaacgagctttcgtctattagcagttgataaccccatgaacggagtatatcctgccgttcctaatacgacaatttgcttaaatgatgtatatgacataccgatgagactttcaaagtaggattgaaaatcctttgaacttgcggcttcatcaagcttattgccatctcgtaaaatctcaaagacattcggtttttgtccacgtttaatgtagaaactatgaccgtcatactccatccacagttctactacagagtccttcttattgaatgagttaattaattggcctttcttaatatcacggaatggtttaccaaataaggcaaaagtaatagcttcgagcatagtacttttgccaccaccattcttacctgtgattaaggtcttttggcatttatcaagttgaatgtcaatggccgcttggccaactgacattatattcttatacttgacacgatttagtttaaaagtcttcactgattttgtgcctcaatgtataactgtttagacataacctttaaggctttgatatcatctgctgataggtcttcaagtgcttggatatattcttccattaaatccaataagcttttaacttctacttcttcgccatcttcagactcaaccgagttgtcaactttagaaacagttcttaattcatgtactaccttttcaagttctgattcaaacttaggaaggtcttcatcgaccgcagtgataataatgcgtactgcgagattacgaaactcttcaaagtcaatttttccagtaacaggataaatcagttttctgtgccaagtgatttcattagggacgaaatcaaaggttgataatttagtgtcttgaacccagaagccgcgtgggtcgttctcgtcacccgctgtaagcgtccaaggcgttccgatgtacttaacgtttgctgcgcttgatatggtgtggaagtgcccagaccatacttgtttgtactttttgaggaaatctggttccagcccatgagatttcattcctttataaaaataaaagccattaagctcccagtgaccaatacagtattcagcagacgattctttgatatgcttcatgatttctgatgtgttctcttcacacatccatggacacaagtcaatcaaagtcccatcaaaatccatagtcacgggcttttcaataacagtaatatgcttatacttaccaagaacttcggttgatgcattaggcgtcaacgtattcttgtagtgcatgtcatgatttccgacgatcgtaattaagttaattccttctttctcaagagactccgcaatttcacgagcgaattccattgtcttatgagtgatagctttacgaacgtcaaaaatatcaccgtattgaatgatagttttaattccatgctttttggcataatcaatatgctgcttaattccgtgtcgttgtacatcctgtacccacgggtcatctgcgcggacacctaaatgccaatcgcctgagtgaataattttcatataacctctctagtagagtttaattttatattattccatgaatagcaaaaagggcccgaaggcccattacttattttgtcattaactcaaattgttctttaaagcaatgctcagaatcttggtgttctaccaggaattcgtatgctttatttcgctctttatcatagagcttccggtcagatgacagatgtttcattcgttcaaagacttcatttttattttcatcattcaaccacagaatgccagaatcatgagaagtcaacggctttccatcaactcggaatttcaaagcatcaccggtggctttatggaacacgggaatagttccgcaagcacctagttctaagtgtgtgtattccagcgaacgctcaaggaatttatctggaagacgtgacagctgatagccaaatccagattgagacatacgctcaagcatttcagagttaacatatcggtcaagaacttgaggattcagacctggtccagttttaacctgatgataatgacggcaataatcaatttcatagcgttctttaatgttaataaacgcaggactgcgttctaacccttccaagatagtcgttttacctgcgggacgcagatgactttcatgaaagtcaaacatcaagaaatagcctttccacgtagtagtacgaccaatccaacgatggatatcaaagtcaatagcagagaagtctttccaatacttatcacgaattgctttgatgttcatagcaggttgaaagttataaactggaggagctgagtcagaatcatcaaagaaactcaacccgccacttggaaaatattcttccattaacacggtattaaaatcgccatttgagctatgactaaacagtacatcagcgcgtttaacggtttcttcaagaccagcatttctacgaagtgacaaggctctatggtcatgttgatatacgactacccgaacctcgggtttaatgttctctacgagcttcttatagttatcaatcgctgcttctggagcattgatagcaggtactgagttgatgataagaatgtcacatgcattaagcagagataaggtcttatcgtagtcatctgccagagacacaggaatagttacatctttatagctatgtgctctattacgagtaaacgctttatctttagcgtaaatgatatttacttcatggccatgttttactaaccactcacgatgctcgagactgaacttggttacgccgcatccctcaagtccgcgagccattaaaatattaatcttcatatattgacctttgttgttaattttggatattttaccattcccgtaataaagcaaaagggccgaagccctttaaattttcttgtatacaacataacccgccgcttcacatatacgcttagcttcttcaaagcgtctaagcatatctaccttggcattatgaattgcttcataatcgggagcaggtgcttctctcctagcggtatcacatttataacagaagtaactacgctttggtcctgtataacgttctgaacaattactgcaccggcacgtgtaatttccttccggccaatcatgtccaggattagaacccatcaaattcgtcatacatcccaattctcttcactagtaataaaatcagggtgttcatctaaatcaatgaatccccagttctcttcatttaccattcataccaccgtttaagttggaaggtgtcaacccagacaagagagttcttatctattagcttacatccttcggtagaacctaacacacgatattgattatctgctacttttactgccattgttccggtagcagtgttcaaagtaaatcccgcgtctttacgtatacgtttaaattttacttgtaccagcatttagaatgtcccaaacagttttacgagaggtattccagcaagtcagaataatctcatcattaaaaggttgttttaaaatagtacgcagtttttcaatagcatacttgtaagcagggaaattgttgtctaataccgcgtctccagcatgagctcgtaatcgctcaagttcacgacggtttttacgaacaactttgttggctcgagcaatagcttgttcttctgccgcttccattagtttctgctgcagttcgtcgcgctcttcctgggtaatattgttcatgttattcctttggatggtaatttatttcaaatgtgaattcagtatcagtccaattataactgtgttcaattatagcagaatctgacctgaaatcagcgtcatgtggatttttcgggtcaatgtgaatatcaaggtcaagcacctcccttaaatacatctttagcaaataagggatagcgtctaggtcttgcacatcttctaaaaacccgtcgaggttaatcttcagcctcatataaaaattccagattaggtccatcgcttgtaggttcgctctttttagcagaccctggcgccttataagcggtggattcatactgcgtcattttgtcgtagatgtcctgaataaaggtttcatctgctaacgcaaccatatcatcgtcccgtgaatcatacacgttgtggacaaaatagctgtatttctttgccatttctttacgttcttttttgatacgctgaacgaatgcattgaaacaagcttgggttatatacgcatgcgggttatcatacttagtttcatcgaagttgattaagcctttaattgcggcttcaatcccgtctgaaatcatttcttgcttccaggattgggtgtatcctgaaaagttgaaacgcttactcagaccttctgcgatcagcataatagcaaggccgatcgtatcgttctgttttactactcgaggaccgccagcagcttcagactcccggcacttctctttccacgcacagattgatttatacagttccttgttatttacataattactcatattgcctcttcgcttcaattaataatatctattataacaaatttgggaagcgagaggattaaagcattacttaatcaattcagcgcatgcaattaatttcatcatgatacgataaaaatcgttatacgtgaaatctggtggaacttcaattacgcattcaaaatcttcaaatacacgttccattccataaccagcgatatcatctgattcagcataccagtacgttccatcttgtgcaaaagttatttggctattttcaaggcagaacacgcctttaattttttcatgtgtaagagtcaattgaattttcatagttcacccttcataatacgatagcattggaacagctgttccatgatacgtttgaactcaaccaaactaagttcaaaccactcagattcatctacttcatgcatcatttccatgaatgaagagtataaactttcataatgagtttcatttaacatagaggcatgcgtttcccaatacataccctcttcattgtcaaaccaaacacccatataagaatctatagtaaatccgccaatgccttctactacaatcataatttggtttactttagccatgtcttcaccgagtcaatagcgtcttcaaatttagagaaagcatccacggatgtgtattcattctcaccagagcgttcataaatccaaaacgcgtcaaaatcttcttcaatgatgaattctccgttaggagtttcaatcgtgtttctgccatcaggcgttttagatataaaccatccaagaaaaccaacttctgcaatctgttcttcagtcatttaaaatttccaccaattgattatagtttaatgcttttccagaagaaatcataacattacaaaatctgtataatgcttcttttgatactttatacacataatcagaagttgttataatgtatgaaatacgtacaaatgttggggatttttctgccaattcatacgccagttttctagctctgccaatatcatcggcaaacttggtatcagcaagcaaaatactatcaaatacccaacggttagtaaaaatttctgtgtatagaataaccttacgcatcaagatactctcgcagttcctgctcgtttaacccttcttgccacatctctgacggagatggaagttggctgtctagagtggatgaatcaattggaaatactctgataattacgctagtatcttcatcccattgatttgcgagtatccgtttagcttgactaatgtcaggctcagaatgagcccggatatacttaatccttctatgccatacaccggtaggaatagatgcgcacacgatatatgaaatcattttgccgccttaaccgctttaacatcgcggaagcctttcttacgttgattcttcatcttacgaatagtgctttcagaaatttcaccgatacccggagtgattggttctacaccaaaggctttgatgccaaattcagacagaagataagcaaccactaattcacggatgcgggctttaccaattttttggccttcttctttcatcgtaccgtgaagctcaacttcccactgatcaagcaaagacggagttacacaacgtccttcttccagcattgcagatactttatcataagcaaaagagttcagtacgtttttgattgcttgggacatattaatttcctcagtaacgattgttttgacagaggagatttgatttaaaatctcctgtagcaaatcaatctttgtgagattttagctcttcgagcatatcatagtattctttactagcaaccggagctacagtgcagtggtagctattgaattcatggtatttcacgaagcgttctaggtgccacttaatcagattgttaattcggtgaagcagaaccccatctgaaccgacatagacaactacttcaaattgaagcccatcccaaattctggtacggacgatatcacctacagcaaaagttttcatgcgatgtaccaatgttcgttttgccaagactcacccttgtaccagcgagtcatatcatatccgttctcgtcacggatagcgccattacgcatatagaagtactcgtcatcagtaaaatactcatgctttactttacagcctttactcatagcttctagagcttcttgccaatttaaccaattcatattttcctctcgagttaaacggtatgctgttatccgttgatagagctatagtatcactcatcaactggcttgtaaacaactttgtgaaaggagtttagaataaaagagaggtcccataggaacctctaaatgaagggtatagaaatatacagaaggtggtcaagatgaccttagaaaggaactggttaatcttctatgatatctggatcgtatccagcagcaataagattggctttaaatgttggaatgtcatactgcttaacgttatccataaaaatgacaggataccgaatagcaagcgatggatagcacccgatgcgtttagcaagtgactcaatcaacggacggtcataaaccggctgaccgtcaacctcgttgattacattatagaactcatatggaagttgcagcttatcgagcaagtcacgaactgctttacatccagggcatctccaaacttcttcagggatgccatagatttctatcatagttcagccttaatctcagaaatcaatctttcaattaattcaagcttatcagctgtagtcataggataaattttgtcaacagtggcttcttcaagatagcaacggtcagcatcgttaagtatacaccactggtcaaaatcatcagcatctatgctaacgccgttgaaggtcttaactcgttcaacagacccgtcctgcgtcagagctgttaccaaaaatggtttaaacttaagcatgttgtagaattcaacatcctttgacgatgcgttatttaaccatttatcaacagagtcgtctttaaacttgtaccacttatcacaacaaaacaattctatcatttcatgacctgttgaagtttggcagtcagagtattaacacgcttctgaaattcttcattagacagtttttcatctttcttggtaggattaatccaatctgcgatgataataagaacaataaacggaattgctacgaaagcacctgccgttaatgcaaccaaagcgataacgttagaaataaatttacgaatagcattaatgaatttcataattttccttaaatagttaagatgaatgctgtcatagccagaaattctggtccaaacagttcagtagccatgtggttcagagtaaacataattttgtaagtcagcatatctatttcctcaatcgtgtgtccaggtagaaccatttcttacccagagtctttggttgtcagaaccacgccagtttttagtagttggcagtgatttctcgtatttcccatcaattataacatcgatgtgttgtagcaaatctaaatctttgatatcttcaaatttatatcctgtccacatccagatatctttctccggaaatcttgctttaacccaagaaactaaatttgaaatctcttcccggttctgtggataaagcgggtctccaccagttaaggtaagaccttggatatacgatttgcttaaatgggatgcaagttctttaacagtattcatagtgaataactggccgtttctagcattccaagtagatttattataacacccttcgcatttatgcaaacagccagtaacaaaaagaacagttctgcatcctggcccattcacaaagtcagaagggtagattctgtcgaaattcattgaatcttacctcattacgtgcttctacttctgcatcatatttccagggctcattagtttgaatagccccagccgatagtccactttcagggtcacgggttatagcaattcccaacggatgcagaacctctttgttgattttccaaatcaatccccactcgctaagttggttccaatcaacttgcttcattggtttctctaacatgttttaccctatgcataatttctttgttcttaccaagattaaacccacgctcagaaggattaccaagatagccacaagtcctacgaattgtattcattttctttggatcagtttcaccacaaattgaacatgtgaatccgttttcagtaggtgtcatctcatgggtagaaccacaagaaagacacttatctactggcatattaacaccaaaataatccaacttctcgatagcatagtcccataccgcttcaagaccttcaaggttgcgcttcatatcaggcagttcaacataagaaatatgaccacctttagcaatggaatgatatggtgcttcacggtcaattttttcaaaaggcgacaggttttcttctactgacacatggaaactattagtgtaccagcctttatcagttacgcccttaacatcaccaaacttggcttggtcaatcttacagaaacgatagcacagactttcagccggagttgagtacagactaaaggcatagccggtttcttccgtccacttgtttagcttagtgttgatgtacttcaggacgagtttaccgcttcctttaaaagtaagcatatcaaattcatggatgccaatgtatcctaatgaaattgaactacgtccatttttgaatagttcaagaatttcatcatcaggtttcatacgcacaccaaaagcaccttcctggtaaagaataggagcaaccgatgcagtaacaccttcaagggatttaattctagttaaaagggcttctttacaaatatcaaggcgttcatccagtagtttgaacagtttattactgtcatccgaacttttataatttgcatccagagctatcctagggaggttcagtgttactacccctaggttattacggccatcaagaacgggtttgccagaagagtctctccaagcaccaaggaaacttctacaccccatcggagatacaggagtttctgaacttgtaattgctctattgtttcgagcactgatgatatcaggatacatgcgtttagctgcacattctaatgcaagctgcttaatatcatagttagggtcttctttgcgtagattaatgccttcttctacaaacatcacaagctttggaaaaattggagtaattccatcacgtcctaatccacgaatacgattatcaagaatagctcgttgaattaatttttcttcccatgacgttcccataccaaatgtgatagtcacaaatggagtttggccatttgaactgaacaaagtattcacttcatattcatacgcctggaaagcatcaaacacgtctttttctgtttttgaaatagcataatcttttactaatgctacctgatatttgcgagcatcacgcacatgtttagcaaatgtcttctctacataaggagccagaactaaatcaacattagcaaaggtagttccaccatattggtgagatgctacttgtgcagtgatttgcgccatgatagcagtagctactccaatactcttaggagtttcaatttgagcgttaccaagtttaaagccattctgcaacatacccttcaaatctaccaaacagcagttggtgaaaggcaaagctggactgtagtccatatcatgaaaatggataacaccttctttgtgtgcttccattacagagaaaggaatgacctgattggcgatatgtttagatacgataccagccatcaggtcacgttgggtaggaaaaacacgagaatctttgttagcattctcgtttaaaaggtccttgttggttttattaataagtccctggatttctaattcgatattcattttaaactcttacgaagctgcttcttgtattttgaagcaagttgtgattttccatcactttcctcgtatgtaaacccatgcaattccatttcagcaatcatctcaggcttaccaagacgtgaaaagcgtttagccatgtcggcaacatattgcgggtgaatattactgtctttacgattctggcggagatagaccagcaaattctctaaccattcgaggtagtcaatatcttgaccttttaaaccagagcggttgaacttatgcttcatttggccttctgccgcattacacaggttacagagcaagcctctgacctttcctgcattgtcaccttctaacgcatggtcatggtcgaggtggttcttttgaatatcctcatctaaaggacgtttgcagcaaggacataatccgttctgtgcctgatatagtttttctttttcttctttatataacttaccggttaataacatactcttacctcagcgattagataagagtatttatagctaaattaacgagtaactaccatacatatttttagatgattctttaacgcagtacgaagtacagaatgcaaaaattccagtgatattatctgtatgataactatagacttcgttgctattcgcatctacaagtttgacgcttttccatgccattccatcaatttcatcttcataataaccatctgaaaattcaatgatatctccaactttaattccatggtctttaaagatgcttttaatctggcgatgcaactcagacaggtctaggagtttaaccttaattgatttagaaatgcaagtattagacatgattaactccaaggcgctgttcaagggcgacgatgtaatccgcggctttttgcattaaagcatactcttctgaatcacaattttcctgtccagcaaatgcgtaaagagctctggtaattggaacgattgcaccttggaaatgattaagtttaatttcagaaatcagaggaacatcttcaccttgaccaatttctttaatttggtgcatcgtatcttcactgtagaagcaccagaaccaggattcgccgaatggcgttgggtctttgactgtgatgattttatttgtcagtaaatcaataactgcagtgattcctaccagttcaaggtcgtcttcattaactacagaaatgacttggaacttaaatcccggaatgaacataggaaattgttcgctcagttcatcatcattctcaataacttcaaactgcttaccaataagtcccattcactttgtcctcataatcaagtagttcgtttatggtaggttcagaagtattataatcttcttcaggaatagcatcttcctctggctcgacagtttcccaacgagccgcataccagggttttagacctttgctactttgcatggtgttggttcagaatcattagcagaatcatgttcaatacgccattcaacttcagtacgagtaaccactttttcatggcgagaaacgatatctacttcaggaggactataataccaatcagtatgatatgaacctgaacgagattctgataccatgaaatgaacgccacgcgctggataataccaaatttgagtacggtcttgatacttgtgctcttgtgtccaatctccatcttctactaaaacaaagatttcttctgcatcatcgtctggtgcattaggcggatattcgaaatcgtagttgtcgtcccaaccaccagtgacgccagcgatatgcttgatttcttttactaattcagcgttagtcattttaacctcgcagcttctgtaagtcttcatcatcaatccagctttctaaaccggatggaagcgaacattcaatttcccacagcaattcttcaattgcttgcaggcggatgaactcttctgctgaaattgttaccatgcacggagcttttaaatcaccaatatcataactcatagttcttcctcatgctaatcataacttaaccatgcattcgccatatttccatttagacataactttagctccattagagtaagttacctctacctttgctcggtgattcttgatttgtttaatctcaccggtttctaatccgccatagccataataaagggctacaatatcaccctcccgaaggagggttccacgataatcatgcattgaatttgaatttacggagttcatcaaaaccgccgatatgtgtaccgtcaggagcaaaaatctgaggcatagttaatccaacctgtgattcacgacctaaacggcgaagcaaatcactgataactacttcatcaaatacacctttttctggcattacgttgatgaatgcatattcttgtttcttaacatcgagcagacgctttgcattatcgcaaaatacacacttatgaatgctgctgtcgtaaccaaaaaccgtgaacatcttcttctatttccttaaatacttgagcttgaacttggttccaactcgggtggttatacgctttatagacgttagtcattccaagacgcttagtgacttcgccatcaattgcagcttgggcaaaatttcttccacgggtcatagctcctttgagattggaactgttagcaatttgaccagtctcattataataaaccgaatacatgagtagcattactcgttcggcttcttccatatatcgtttacgagccatttccagccttagtagttataactaatgttttaccatctaacgcgtcgagaatatctttgatgcaattatctggcattggttgaacgctagctaattgcttggcaatatcatcaggaattcccatacgtggcacttttagtttgctgaaatcaattttatccattagcagttaccgggaagtgttctgccaatttagcagcaatggcagcgttaatttgatcagcgaaatttttattcattgcattaacaatgatttcttgaattcggagattagctctttcaatagacatcttaatacgaccttcagcttgcttaacagcgtcatcaatagtttgacgaaccatttcatcaatagcttctttagcactggcttgagcagcgtttcgcatcttctgagacatttcaggtttagcggatgtatcattccaaccacgcgaatggaataattcattgagttgcttacggacttctgctcgtacatcaggaacatcaatagcagcaatagcaatttcggattgtactgcttgcttcagcttgttctgggaatcttttaacaccatttctttaacgatgttattgattaccgattgctgcagttgagcacgggctgttgtaccttctgggaataactggcgtactgcataagtatctaatttaatgtcaatcattttacctttttcactccaggaatattagagatagtttcaaatacttcgtcaaagttatctttatcaacagtgactaccatagtgcgagcggtctgtttctttttccaacgtttaaagaaagttgcaagactcaaatcatgggaagtgaaaaaatcatcggttttgtaaacatatccgctttcaatttttactaccgcatcaggcgaagggtcttcatattcttctacttcaacatcatcaaagagtattaaagtgtcatcatgataatagccttcccagaaggcttcatcgttataaaattctttccaaagcgcgccagtggttttcatttaatcaccttcttccaagcttcgtgagcagcacacgctaatacttcatcatcagtcaaattgaacttgccttcattacgacgagcaatcatttcattgaattcagtatcagttctaagcatcatgttaagaactgtaaaatccattgtcgctcgaagatattctttaagctgcatagggtcgatgccactttcgtatgcgtcaagaatcatatctgcaatgatgttatcaaagtttttgtcttttatgaggttattagcatactcaacaaaaaacttagtattagcaccagtaatagttttagtaatcattttaattttctctcaaatttatgcttacaagtccgacatttcattttcagaatatcggttgtccaatcgacaagctgtacttgaatactaccacatttttcacaaggcacaacttgtttagctgcagcttctcgacggtctaccatttcaagacaggcatcccagtcaattttaaattcaggtacaggtggatactcaaactcaatttcaaggtcgttatcatcaacgaccatgtcttcttttaattgatttttcacagtaagctccgggcatactcgagagattcataccgctctttgtactcattaagcgatttaaccaaatctgccatagctaattcatgtttagccaattcagcttctttggtatcaataaaccgcttaaccgattccatttcggcagtaatactattcttagcagtttcaatatgatttactggtgttaacggaagaggcttaacaacattgagatacatatgtgctacatcttcatcaataactggggtggtgctcaatgttttgggaaaaatcttaaatgggtccaaatgcacttcaagaacagatgagttttcaccttgctgtttacagcatgattttttaactacatccatatgctctaatgcagtacgaacctgcgctaaaagcgcccgagccggatactttccgctggacaaatggctattaatatgaattcgtacagttacattgtcaagttcttcggcacgaataaatgaaacacccttaggatttctagaactagtagaagatacctggtatttcacacgctcatcgcctttaagtaagcaaattgaacgattaagaatacgacgcagatttgcattaaattcagagcagaagatttgagcagcgctaaggtcatgtctttcttcagttttaaacgcccctgccgcaaagctataacgctgaccgtaaattttagcattgccgatagcaaactttttgagctgtttctctgctgacattgcacctaaccagcgagaacgacgaatgttttctacaacaaaaccagcataattggcttcatgtgctgccatgctatttagcacacgccgagctacattaccagcaattgctacgttataagcagctggatttaaatcatgtaaagctgccaaaacctttacgtgcttctcacgttttgacaacccctttccattatgtttatcaaattcaccggctacaaacatctttaattcattcttattcattatcttttcctctattttggactgggctcaaagagtatctcaaaatctccctgaacccattatacaacaattattcctcaagcattataactttgcttgggcgcttatagaaagcatgagttttatcatctttagctaattcaaatgtagcagtaaactgtactttgcctctgtattcaaacggaatactttttggaagggatccgtaaaccgtagctccattctcaagtacaaccatcatcttacattgtacgccgtaatagtcttcataaacttttactgacgttacggtaccagagacagtcactcgtccttccggtgcatcccctttattcttattcagctcattgaatatattatcaaagacctcttttgaatgttcctggatagcctctaagatgctcttatgagctctaacttctgccataacaacatctgtgccatcttgcaatttccactctttatacggaatgcgtacttcaagaggataaccatactcccgaagttctttgtactcttcttgagttaagcggattttccaccagccgtggtcaccggtatactcaggcttatccagtgaatccaattctgtaacatacggcaagtaactgcctgcgtgataagcttcaacttcacctaattcattctcccaaagatagccatcaaagggagcatgaggacgatcgtctttgccccaagtaggagctaccactttatcaaagtattcacgaccgaagcgggtcttcgcccatccagcattcaactcctcggcgcgtttttcaactttcgctcggtgtgcttggcgggctacacgattttcttcaacaagtgcagagataatctcggttaaagttttcattttattctccagtttggttgacgagaccatcttatcaacagcctcgccgaaagtaaactactttgtgaaaaattttctccaaagcagaactgcgtctctacgagatacttctactgctcctagagcaactgcttgcttgcgacgaacatcgcgcaaatcatagtgtggaactcgcttatcctggaaccaagaacgtttcattccgatggcttctgccatagcgtgcaactcatcaaggttgtcgctaaacatatgacaattctttacttgatgacctctcattttccaaccatgattcatcaagacatctacgtataccgtcatttctgattctcgatgtaagtttcaatgatgaactgtgctaaacacagaagattatcttctgaaggagaatctactaaattctcaaccatttcagaaatagttccaaaagcttcttcagtattgaacatttcttgaagttcgttccaagtaggtgctttcatttcaatctcctcattagttaacgaagctatcttatcatggattttctaagatgtaaacaacaaaagggcccgaaggcccttaaaaagatcggaaatcactgttaaaccatggcgactggtgttgtcgccgcttaagcaatttcagttggtatttcctattgtcttctataatcatcttagaggcttttagctcttcagccaatgagacctgtttacggtccatcaagatgaggttctgggtcttctgggcaaacgtctgaatacctttgagacattccacagattcctccatccctcgtttatacttggttcgggcagcatttaactgcccttcgtaatacgcatgtatagacactatagtactaaacaccttttacctcaataacatctaagataatatcttcaacgtcttgctcagggaatgccacgccattggtctgcccatgctgaaatactgcttggtacgctgacggcgcagaaattcgggttgaacgttctttattgtcatagcatttgccatcaataaagcgtttaaatttaacttcataagtttttaacattattacaccttagcataattgacgatttgttcacgatcagcgggccaatttaaatcagaacgtttcttgtttgaccatgcaatattttcttcagcccaatgaagtttagccgatacgctcttttgtacgtctctgatggcttcttcaagataaatgcctaaatctctcgggttagttccttgagttttaaatgcattgagcaaaatatttcttacgacttctttaaattgattttcaacttccgggtgaataaattcacgataaccgttgcacggatatccaaaagcatctaccatacgagtagtactaaattctttgttcataatccgagcgcctcgcgttcatcaggatttaatttcgccaaagcggcttctttaattttttccaaccgtttacgcttagcttcaggtgtttcttcctggacggtgatagcagcctttttagggaatgtccatgattcgccattttcatcggtgaatgtaattagttccgttggcttacgattaactgtaccatctgagccccaccaagactgccccttaactgcttcttcggcaacgcaatatgaaccataataaccaaacaactcactacggcgatcgtctggtgaaacatacgctgcataggcttcactttctgtcattacccatttcattttagcacctcataacgaataagttcaatacgatttttaagctcttggtatgatttacgccaaggcttataataagcatttaaatcttggtgctgtttatgcatttcgtctaaatgctttactgcatcttgtacattcacaaggaaagtatcaaatactttattagcgtattctttcctgagttcaatgaatggaggagcacgaaatacgtttaccattacacgtagttcatgataagaagaatggacttcagctaatacatttttcttatcgccaaaattaaacttataaagtttttcacagattgcttcacaggctttctctgctttacccttgggtttacccgcaaagatatgaccaggcggatatactttaatatcgtttaaccaacattcaatgtctttaatagctgctaaactcattgtacccacgctccgttttcatcaatgtaattaatccactcgttaatagtccaggaagaggtatcacctttaggagtatcaacgatatacattccgcctttaaacaaaacacgttttacatcattagaaattaaagtagccattatattttcctcagttagggaggatttctcctcccgtttaaattatttcagcattgttacttcagcaatttcacgccagtttttacggtcagtcgcgacgaaatcaccaatataaagagcagtacggagagacacgttacgcagacgatttacgttatctttcataaattccaaaacttcaataacttcggaatttcttaacccacggttctgtaacatagaagtagtcattattacatcttgaactcggaccataatctcttcattagtgtgaacaccaaggtcaagataaaccgaacgtgataccaaggcttgaagatgtggagcaagtttagaaccgcgctctaattcacggtcaatatcaacgttagtgataaagaccacagtaccttcaaactcaaactcattaggaattcctttatcctccaagaaagaagatgcagtgctccagcatactttacgtttctcccctgaatccaaagcagctttcagaaggttaagaatgtccatatcagagaatacatctacatcatcaatgagcagaactgaatttgcttcacgtgattcccaaagacggcagtataaaccaattcctgagattttaccgttcactgatttgtaatcaatagcgttagtatcatgagcatgttgtaatgctttatccaaagagtaagtcttaccgatacctgctgctccggagataatcagagaacgaatgttcccgtggattaaaccgttagtcattaatcccatgacgttaaagcgtttcttgatacgctctttcatttcatcaacggattcaacaacttcaattttagcagctactccatcaattgtgatatcatctttgaatacccaaacaccacgctttttgccattcagttcaacaaagactttaccatcaccctggcgagaatcttcagcacttaagctatccgggaaccactcaccgagtaactcgtaagtacctgaaatctctttgccgaagtaaatccctttcttgatggtgatagttgacattttattctccgttactctgttttgttttgatggagctatagtatcaccagctcgcgagcttgtaaactacttttttcattcttttgaaacaaaaagaggagcccgaaggctcctcagttatgcatgcttattgatagcattttctgctatacgttttggaagtttacctgcccagcggaagaacatgataatcgctccggcaataaacgcagggaaccaaaagatgagataaaaccaatactctcctgctttctcgatggttccatttttgattagatgcttacagacagaccaacccacgacaaagtaaattattgcaacaacgattggcactactacgctccacagtaaaatcatatttcagcccagtaaagtgagaaccggagagtttctccggcccatgacataaaacgatgtacttgtttttgagtaggtcgagcagagaatttagcattctctctacgaccagtctctctacaaactgcttccaaataccaccgtctacctttatgaggtcttccgtaattcaagaagaccttcattgtatcatttgtagtaagaattgtggttttcaagataaaccttctcgacgaaatcgtcccagaacttcatgtctactttcttaggcattccattcttttcggcttgatgagcaagacgctctactgcatcaacggtcgtttccaaaatatcctgaacttctttgaacggtaactcgcccgctttgattttcttaatcaggggagcctgtgccagaggatatttaaggtcaccggcagaatagatttcctgcagctgaagaccaccacgaagggcatgactcagcgctttccaatctacgccttcgttagcttctgccttacgagcgcgttcaccatattcagcatcaagcttctcaagggagtacttcatttctttaaccgtgatagttgtctggaatttacgacccaacacattatagaaatactgctgacctgatttatggtctgtaaaggtggtccactcaaggaattcacctaccggaagacgatcggcgatatccttaactttccaacgctcgttaatgcctttctgcttgggacgatcgtcatatttccattcaggaacatctctgataacatccaggactttatgcaaatcggctaaacgagaacccttaacgccatacttacctgcttgcttacggacatatccaagataagccttcatgtcagtggtatagaaacgagctcggttgtcttgaataaatttccatacttcaggaaggtcagatgcaactaccaattccggcggagtatgcagcatatccaacgcgacagtttcaccgtcagcagcgagtttgaagaaatactttaagctgaacagctcatggtcaatgtcatctttggtatttttggttgcgctgttgttagtattacgattggtgtgattcatcgcctgacacattagaatatcacgcggatgaggaacaaagatttctttgaaatccacatctgattcaggagttgaagtaccgtatagatgcgaaccaaaataagattttacgattgttttcataagtaaatatgattccctttagcgaatttaactaatgcattagaacgtttgacggcttcttctgctcgagttttatcagtagttctttttgatgtacggtaaacattaccaattttttgactagtgtaataatacactacttcatgtgtatggtactcttgtccatcaggatgctgttcacgacaggtttcttcacgcagtgtggtttcatacataggaactaatgcccaatcaattcctgtgctaatgattgccacctgaatgtcaagtctgttccagcgaaatgcattgatatatcctaggacccgtgattccgggtccatcattgcgaatttaatgttttcggctgaagctagcggcatttgttttacaatactcatactaagttttttcttagtagttacgatttcaatttccataccccgccttcataatatatgtctaaatcaatattatctttgccgctgtacttgccagtcaaaggaataaatttaacagtaatcttttcgccgtcatcaaaagtaaattcagcaataggatatgtagaaattataccacgttcggttttagcacgaaagacggcccgaaggccgttcacgatataaacttgatcattcttcactaggttcacctactgtaatatctagcattgatttaacaagcgagatgtcatttgtactaaacacgtgagcttttcctttatcgttctggcaaaacatgcttccatctgctgcaattgctagtacttcatagcagttattagttgtagagaatttatcacccactacaagaggaacattaactttacacttctcataaacggtgtatttaaggctgctgagattaattaccgacttagaactacccggtaaaagtttgcagatataaaatccatcgtctgctgattcatttaggtaatcatcgatatacattccacggtagccgtcttttggatatactacagtagttgtttctcggctgctatggtcgtaatatactacgattttggtgtctttacttttaaagaaaatcgatactgtatgcgctgagctacatttgaacgtagaaataaattcaacttcaagctcaagccgattactttgattgtcaaagccaatttctactttatcacctacctttaacggcttttcaacaaggctttcttcaaatttcgtgcgaataaaacatttcatttatcaccttctacataatcaatcattgggcagactttccgcttacgagcttttaaatactggacgaataccgacggttcagcttctgccggaagaccagcttttacccgagcgagtttcttggtatactttttctggatacggtaatgtttaaatttttctaaaccaaaaataaatccaaaagctatagctgcaaacaaaagcacaaatgctgctataaccgctgcgccaactggtactgctacaacgtttaaccaaaacgcggataaactaatacctatccaagagagaattcctgtctctgccacaatcggccaaccgaacatccatgcaacagaaccgatgaacgtgataatcgccgaagaaaacacaacatgaagaactgtcgtccagaagtatccacatagagtttttggcattttccacatgttgtcagatttaaaccacaggttcattttgaaatgccaagagtttttattaatattcattatcagtccttcatagtcggaatcatagttacaagatattttacgagctgttcagcatcggatttatcaatcatcaagatagtaccgttgcgctcaatttcaataagtgtagaaccgtatagctctacggtagtcagatgcaaatcattaatgtatggactttcgtcctcaattactgcatcgcctttacgggattttccgtcccatactaatttactcgccatcttttgcctctatcaagaattgaattaatgaatcaatttgtttagtatcaagatgaattatatcattgccttgttttagcacgatacgactcaactttttagtgaaatatgaattcacaacctttacatgcacatcgctgtacggattatctaaattggtactatcaagaatactttccataattacctcaattgtgaatcttttgaaccacgacggttataagcagaagtcattactgtatcccactttccttggcattctacacaccgttgacagcctttaaccaacagacgacgagctactggaatttcctcatcacagtcaacacaaaactcttcggattcgcgctgttcttgaagctgtttctgaagacgagcccattcaatcccatctgctatagttgcttctcgagtggcgaatccgtcatcagacggaccccagccattcatttcaaactctccaaaatcatgtgtaccaaattatacgtgaacattggatactgatattgcaccatgatatagatgataagtaaaaggtttctcatttttagtcatcatcaaagtcgtagtaatcgtaatcgcaggaatcaagataagaatccgcaaattctttctgtcgacgaaaatcttcaataggagtcaatctgtctgcatacgcttggtcatctgggtcactgaacttgtcttcctgaagttctttaatgaactgttcagcttcttcacgcgtccaaaacccacgattaagattatgaaccgaacgcttttcacctggcttgaatacgcccatatcatgtgcagaccgctcagttgaatagctttcagtttggccagcatagttttcatattcacaaatcaccttgaagaaaggagattttcgcgaatacacaccacgaagaccaagttctacatcatacgtgcctgatgcaacaatgtaacgcgttatttcgccgcttttagtttctgtgcgattaacaccacacacgtgataaaagatttttccaggttgaagctcagtggttaacttaatcataatgtttttctcgtttggttgttgatatgtctatagtatcatgtaatgaagggaagtaaacaactttttgaaaagaaaatgcctccctaaggaggcggagggtattactgcaatgataacaaatacttagtcttgtagcatagacctgtaatgtcatccagaacactttggagggcggcaggaacggacttgtagataccatcggccttaaccagaatgaagtctagcatttcaatggtgtcctttggcagctctttctgcgatggtaaagccggtgtataactcttacctgagaatcctaaccactgctcaccaaaagcatctatcaaatctggaatctcgttaaagaaaacttcatacgctttatgcctggcatacgatttggtatcaaaatgcgctgaatgaaaatacgcttgagacaccataagtaaaccgatgaattcatcttgcggagtaagtttaccgtcctttacaaaatcattgaacttcattatcgagttgtatcctcatgcggttagcatattcttcacctgctgaacgtcctaaagaatcgcaatctttagaacaagactcactattccatttactttgtataaaagaatagaactgttcagactcttgcttactaggctctttaaatttagcataaacttgtagagctccctcaacatacgaattataatctgaaatgtcgtcgtgtgatgcagctgggaatgaaatcccgcagcccaacaccagggctaagcaaatgtgattaaaggccatacggcctcctattatttttgtccagtattacgtttgtgctgaagtacagccttaactgcatcgaggtatctttcgtgagaacgcatacgcttatagtccgcttcagaatcagtttctttataagaaatacgaagtgctgaaataatatgcccaacctcaagtcgaatttcgtctaattgagaaatggtcaaattacggagttgcttatgtgacaaatgcttcatatacacctcatcagttagtaatagtatttatataagtatgtgttacttaatcccaaagccattcgcagattccttgctcaatagttctagcacctgcttcgtcccagttatattcttcatcatacttcaatgcacgtttaatttcggctttatgaaataaacgcggaaccggcattgcatagcgcgtccagcgcagagttttccataatccatcacgctttgatttagcgatcagtttcttggcctctaacggtctttccttgttttgttccattttattatcataatattcttgagcattcttcatacttttgtatggctcaggaagataatgaattccaaaataaacgttattattctgatcgttccatttggaagattttactacatgccagcctttacggcgaattgttctagacattattacctcgttaagttaaattacctcaacgatagtaaaatcctgatttgaaaaatttaatattcatgaatagatgaccttacatttacattttggacattcaggttctttggttttaagacgcttggtagccgtctttggagcagtgttgtaatcatatacatgaagacaacgatagcacatcacatattttttcatattaaaccaataacgaaagcaatattacgtatagtaagaacccaatcacaagtactaatactataccacccgctatagcaaataagctactcatgtttaatataacacccattcgtattagcaataaagtctttaccctgtgccaatactttacattcggaattaagacgattttgcatttcttctcgtctatcactttgtatagatgctgctacaccaatccaaatgaatagcatacccataattagcatcaagatagtgttatacgttcttggcttcattataaacacctaccagttcgcaccagtgtttacgacaaagagaaacgtatttgtcttcaccaccaagttctactacttcaccatcggtaatagcatttccgttttcgtcaatacgagctaccattgtagccttacgcccacagtggcaaacgcccttgagctcaacaagtttatcggctacagaaagaagagctttagaaccttcgaataactcgccgcgaaaatcagtgcgaagcccatatgccattactggaacatcatacaagtcaacgattttacatagctgaagaacatgttcagcagtcaagaattgtgcttcatctacaaatacacaatgaatatcacgttgtgtttgtgcccacttgaaaaattcaagtatgtcaatagattcgtctactgtattagcttcatgacgtagaccaatacgagaagtaacttccgttgccgaatcccgagtatcaatagcaggtttcagaatgagagttcccatgccgcgttctttatagttatgggctgctgtaagaaggttagctgatttgcctgcgttcatactcgcgtaattgaaataaagctgagccattaaagggtctccataaaatcagaaatagcattcttagaacgaatgagttcatcgtattcttcaggtagaccatttccgtaaatggcactaatagctactacttgctcggcacctgcataatcgtcaatcaactgccacagtttagttttttgctcttcagtaatcatctatttacctctaacaagacggatttagcttttagcttcttcatattctaccaccataatgtcaatatcaggtgttgctaaattgattaatttctcaattagttcccaatcgccgccagcaataccagctccaatttttggaatgtatagaggacgattataaacaatacgaccagaatttagttcatggaatgcattaaaaattgcgccgtaatcaacatttggacctggagcatactgagtatacaaattatagcaatatgcagtgccattcttgtggatagctcgtgtatgagttccaagcttagctaaattgttgtcataataacggtcttcatcgatgtcaatatcgagaattggaggatatgctttagcaagctgccctgctacgccggcacccattgtagtaaagcaattacatccatgagcaatatcgcattcatgcttcatgaataactctacaatattacccttgatatatccagtaatcatttattcacctacggaattttataagttgcatattcattaagattattgtatactcttaaaaatatagcattgttacagttaaggatagggtttaacacgccttgttctttagggtgcattactccgtcaatagaaacgccatcgctctgcattccacatccacgagcattatattcgacaagtggaactatcacctggtcatctttatcttgataattataaaatgacattagcaattttctactgctaggaacaaatgctatttcaatgttattcttgaatgggccattactttctattttagtcccctgcgctgcaagcacagtttcaggatagcctgggagcttttcccaggcattaactgaaaatgcgcagcataataaaatagctgcttttttcattttgacgatagtcctgacatataacgagccattaattggtcacgatacattaaacatatattttcgttaggagcattgacacataaatctttcatgctcttagccttacgatttattagtgttgtccattgggccgggctacgtgaatcttttactccatcgctgaatgctgaatctaattcaagcgctaatatatcaacacattcagagttcgtattgcaaaatgttttagcgatacgaagtgaatctgtcattgaattttcagcattagcagagaatgccaataccaatccaagaagcgcggcgtactttaccattattccacctttgtatgtagcattttatgtttctttaagaaattagctttctctaggacatctgacgcataagagtttccccttttgacattccatcctgcattataactagcaagagcttttcgcatattgccgttatgtatatttaaccaatatgaaagctcaatatatgcccattccgcggaattctgtctagatttaagcatttttcttatttcagaatcactaaggtttttgccttctaatttagctctggctttaaccgtaggcaagtaattttgaaataccccataagaatgatgcccctttcctgcttttaaattggctcctgccgaagattctttccatgatatagcagccattatatatcctaagccgttattatcatatcggttatgcggagatttttcctttccggatttttgatattgttcaccaaaattatatgcgtaatgcaagttgtcaagttgaacattactgaaagttggctcagacccaaaggccgttgaacataaggccattagaccgataagcgcttttttcatgtttacctcaattaatgtgtataacttttgtgctgattttacctttcaaacgtttatcattaacgaatgccatacgacactttatactaggtccttttcccggtcttggaatatccatagtaaaccctagccacagatttccatccgtaatttctaaccgcattggcttatactcgatgttttcatcaatgtcttttgggtcaattggaagccaaggcattgctaagaattcattaatttctttaagatgattaggaattttggaaagaacagagaatacatactcttcatcaatttcacgttggatagcacggtccaacaaatgatcagagtacttagtgaagaaaggctctttgccctcagccttagctcgggcacgaactgataaattcaaagagcgaaatgcttcctcaaacttacggcgcagtttagttctgcgaatgaatacttctgggttagttgacatagttcattctcctttgtgtgtagggccatagtatcatggcccgtaaggaaagtaaactactttttaatatttttcttctggacagaacacggcacggcaagcccacatagaagcttccttcagtttctgttttgctgtacgaatctgggcaatacgctcgtatgcttcatcgagtacctgcttaggttcattgactgacacttggtaattaattaatgcctcttcttcaagagcagtaaagataagaccaagacgagtctcagcgtctttgatagcattaactttaccaattttttcattggtatgtggcttgtatcctttaatatcttcgattgacattatagtgcctctgtgaaagtacgagcgataacgtcgcgctgttgttccggcgtcagggagttgaagcgcaccgcgtagccagaaacacgaatggtcagctgcggatatttttccggatgttcaaccgcgtccagcagagtttcgcgacgcagcacgttaacgttcaggtgctgaccgccttcaatttttaccgttggctggtattcaatttctacttcacgcgccttgtagccataaaaagtttcagcatccgtaatagtatcttctttaagaacttttgaaacgattactcgtgcgtcatcaccatcttcgatgtaaatggtgcctttaagttcaccttcaagaatttgatatgctttcatatttcctcttaattagattctttattccaaccgcgcatgtatgcggtaattacgtccatagtattccactcagtagaatggaacttggatgcagcctgtaagtacgagattttaccttctggcattaattttacccgtgctaaacgttcagaaatagcagcgtctttccatgtagcaaaacccgttggtccttttaattcttctttaagacgaataacttctgcttctaattcagattctcgccataagcgttctctggcatcattagcataaagtatttcttcatcagtctctttatcatattcgacgatttcgataggttcgttcacaccataaccacgggtgccaatatacgtagtagcttcttcccatttctgtgtggtttcgttccaagttccattctgatgagcttcataaaaatcttgctcaccagaattactgaaccattcacagaagctctcaactaagtgtggaggacaccttataacaatttctgccattgcactgttttctcttgaatgcgttggtcatatgtgattaagcttgaactaatcacgcctttgagcttgccagatataaactcaattctaaaattaggatagcgattcatccacttcgtgttaggagcattagaaatgaattctgcgcctttaaacggaccagacagaaacttgtagcgcttgtactcaagcaggttgccagccgtaaccattgttattaattgcttcatatcggcaaaccctgtattttccattactgtaatcatatcaacaatttctgtctgtgtcatcattgcattcctatcacgaaaaataaaggtaaagtatcactaggcatagaccatctgatagcttcctggtacatatcatagaacttcatcatatcgggaactttcattggttcttcaatgataattaatgctcttccaaactttcttcctctaaacttataagaggaatcattggatagaaattccctgattgtcatcggaacaattgatttagctatctcgttagccggtaatttattaattaaatgcgatgaattatattctcgtagaataccttccatcaattcagatgattgtgtgtatcgagtagataagattataaccgaaccatcttcaagcaaccaatcggtagcgaattggcacaaggctgtggtctttccggtttgtcttccaccgtctagacgaagggtaccgtactctcgcataaggcaagacggttcataaaaactgtagttgggattattcaatcgtctgtctgcagcgtctctaaaagcatgcatcagggtcaaataaatgggagttaagtgtttcattttagattccagttaaagggccattccttggcgcgtgcttagtcctagtaatattcttaataggtatagacaataaggtctaaacgtattcacggcctcccttaagggtattcattcgtactttggcttgagggccgtcatggcttaaatcataagcacgcattacaccccaagactttttaattttagccaaagaacctttagatacagtaataataaaattatcactgcctttggtccattcaactgaatctacttgcacgccttccttacgaagatttgacacaatagcatcgacgaattctttatccaaatttccttgggtacagatctggaatacttttggtgcttttgcttcagtgataaattctttataagttttcattttaaatcctaagatagtaagtttaaatcaaatggggccattccttggcacatgtttaatccatcgacacactatgtaaaccccttaccgcacttgcgctcgaccttattacaggtagggaaagctacttcactcagaggactcgacgttcatgaggagaggtcgtgtttagctttattaggaattagttttaattacgggctgcattagcaacggcgtaagcgtattgaacattagcgtctttaaacgtacctttagtggtatctagatctgccttaaatccgcctttagccataacctcggcgaattctttacggaaagccattgcatcaagacctttccatgctgatttgtgcttggcgaattcaagaccagcgaagttgacagccttagccaatttattatcaataacccatttacctgctttaggtacaaataccgggcctttctgtttggagaacaattttaaattccaacggcgaaggtctgcatcggctttaacaaaagctgcgtctaagttactagcaacaacatcttgaatatgaccaaatttaagcccatcggcttcaatatttagatcgttacgccagcgaagtccttcccaggcgaagcttttaaagtcagaagcctttgtagctaaataccgctcaataggagccgttttagggtcaaagccgtttcctcggtaggtccactcatctttattaatgccttggacctttcctacagaagcttcggtgataaattctttataggttttcattttatatcctttaagctaatgcgtgtcatagtagccttcatttaataaggctactataccacattaacgtctcaatgtaaactacttaattgatttagcgtaacgaatagcgccgcgatcgtttacgaacgcaattttaccattacgcatgtacatggtaacagtacgctggtaaccgttagaagttttgccagactgataacctactaatgcaaagttatcttcaccaggtttgttctgcttagccttaatacgctcatgaccaaatgccattaaagagcgtgcatcgccagatgctactgctttgcgagaagactcatcttcaattgaagaggtgaaatcatcgaatgaatcaaacttggcatggctcttattatataacttgccgtctactacgtagttatatccaacaacgtccatttcaatttctgtaccatcttctaatgtggcggtcatcttctgaccttttttaaatttcagaagattacttccaacagattcagtcattacgccaactgttgctaaacgggattcatttaaaaattcttgataagttttcatttattttccttgataagcggcccaagttccggtccgcatagtttcaattacacgacgagcacgattaggtgtctgacgataccaacgtgaatttgccagttctttggcagcagcatcccattttttagcagctaagagcttcatggaagcagggaatccagcgacaccacctacacccatttggaataccatgttaattagagctgctctacgaacatcatctaatatattatataccgggcttaatgtagcattagcaacaatacctttaattgccttctcaacatctttggcaaaaattacttctgcctcagcctgagtaatttggccaccagtagaacgacctacaagcttgtccaggttagaaatagccaaagattttgacgggtctttagtcagtaagtggccaataccaatggtccaatacccttcggtatctttataaattttgctgtcatatccttcatcgatacgcaacatgccaaaaatatccataaggacctcctattaattataggagtatttatttggccctgcacttagctatgaataactcaaggctacacttctcgtatggcgtccatttacctttccaccacacataatctcttctatcgtcctctggaatttcattaaatcctggacataacttttctgccatgtaatacgacgattttgcatactcactatcactgaagacatatcgtgatttcattagtatacgcgacattttatctctaggatgaaatatgctaacccattttccatcgtgaataaatcgtagctcatgcttataaatgtgtggaatgcctaattcaacggcttcttccatagtaacctcactgagctgtgctatacatttgtgtcatgattttatacaaacttggtcccatcacatatttccattgagaaggtttaattaaagcaaatgcgtcgatttccgggaaaggaattccattttcatctttatggtaagctgtgcaacggcaatttcttaacatttctgggctcacagggagcatatatccaaacagatggatatccttattgctggcataatcatgtcgtccaaggtcatataagaggtcctggtcaaactcagtaaatccagtctcttccttgcattcgcgaatagcagcctcttttggtgtttcaccaggctcaacatgtcctttcggaatatcccatctagaacctcttccctgtacataggtatttgtcatacgacccatgaaaagccgtttgtcattggtaaagaataagattcctgcactgagctctttcattggcattcattccaactttcttcaagaatatcttccatggcagtatagaccatagactctaatacaccatcacagttatatgaaccttctaccgagaaatcacagataggtccattaataccaagcagttcttctttaagtgaaatctcgataccgctcagtgattcattatcgctgtaacacagaaggcgagtatcaccattttcaaattttacatgtactgcaacagccattatttcatctccttaatccaggataaagtttcattacgagaatcatctttagatttttctttctttactttgggcttatcaaatacaccccgctgtcgttgggaaacgaattgcaaccaccgagcaagcattgcaaaccaagttccaacgcctgacatccaacctaaataatacagcgcatttccaaatactggagagaacaagtaaaatccccaaaatactccaacaccaacaaaagtcgagaatgaaaaccaaataagcagaaataggaaaaaatacaagaaatcattatctttaatcattccacgatagcaagttttaatcattttctgcagctcctaatccaggtgttgaaatcttctttttctttccacttcttgtatttcatacggtaagctaaaaatgtgcagcaattaatcaacgcgataatcagcatccacatgaggctgaatgcgaaaacacctaaaaataaaagcataatcataaactctgagacgttcaatccaaagaatgtccctccaacaattacaaaagcacaatataaaatccatgtcacaattccaaaagctggcgccaggccgtcttggttccaaaacccgtcaggtttacattcattcattttcttctcacctctttaataaactcaaacgactttttgcggttccattcaagagttaaattcttgcactgttctttccattcagcctttcgttcacagttatgcttaacatactttacccaacgaaatagttcaattaatcctagaccaagtaaacctattaatccccacgtaagtaatagtacattcactaatgatgtactgctaatttcagccaaattcattacgtcgattatgataagcgttatcatagttccagcagcacagaccatccccggaattagaacataatcagtttggtcaaatttatagacataattataaacgggaggttcacttggcagatataaattactcatttctgcaccctctcacggcagtatttgataaattcatcaatgattaattgtttgcctaccatgttgttagagtcaaacatactcataacctttggtggcaattcattaatgcagtaatttaagtaattgatgtaatcatctttagatgtcacatatttaactaggttaatgccaagacgatagctatttttattatgaataatctcaataactatggtgtacgttgttgaaccagaggtagaatatccatcggcattagcacgggctgatgttagatttgatggagaatcgttaaaagaataaattccgtaccgaagtgcaaagatatctacaagcttaactccatcggaaatagacgaaatgctagaaattaagtttttcagcttggaatagtctttaagaacgatagctcgaggcaaaactgtagtgttatacccgttatagcgagttttccaattctcaggccgagtatcaagacaagcaaatttctcgagaatatcagtgatttctgttgggaatcctgctgcaattaattctttaatttgaggtgttgccattggaatatctccagcgcattcatataacattttattatccaagttaggggcccgaaggccccggtaaaattacttcagactttccagatattcctggacatcagcagtggtggtttcaataccaggctgagtaccgctgaaggtttcaactttcatcatgatgtcttgtacatctactttagcgagttcagcgatttcaatcacgtcatcagcagaggtaatacccagagcagaagcattacgggtctcacggatgtattcgagtttcactgccaaatcaagacgctggtcatcaagcttaactacagtttcttcaatttgggcccgcatttctttatattcggcagctttatcgcgtaaagctttagcagtacgacgatacagaagacccagtttagcgtgggtttctacattcataccttctgccatcaagcgacgaatttcgcgctctttggaagcacctgcctggtctttttcgtcagcaagtttcagcagacgcttttcttcatttactgatttaacatgcgtggtacgcagtttagtgatttcatcaataatacgatttgctgcagtggtgtactggtcttcaacagaagtgttctgtgcaacaaaggtaccgaatttagaacggatgaattcaacaagttttttcagaatagacattttatttcctttcaatagtagtggtgtttttattcgtacggattaatccaatcataaacatatggtttaatgattagaccttgttcgtttttgttgcgctcaaatatctcgatgtaatcagtaacgtatgactctaacccgagaataagaacagtttctttgccttcttctactgttgccttaattaggcgctcgatagctattttagcttcaagacgaatatcagcaagggtttttggaacttcatttgtatgcattaatgagttcctccattttgtccaaaactgcgatatcaacaagacgattaaccgccgggtcatcggcaaactcattgtaagttgaaatcaccaagttctcgatggttttcagcgcagccattcgttcttctccagacggaaagtttggtgtttcaccaaacagtctagcaaaagatttaaaataagtttgcgctactaatctcaacttatcctgatacatatcaatttcctcagtaggtggggagttcattataactccccaaaattattagcagttaattaccgcttcaattcgtttaaccaaagcaggaacagttttagcaaacttgatagccatttgaaccgtagcagcttcttcatggtaaactcgaacgtagtactcttcaacagcaggccaatctttgcgaacgtgtttaatcaaatctttcagttcacgggtttctactacgttgaacactgcattctcatgttcacctttaatccaaatcgcacgataacgatcaggagtaccgtaatgattgtaaccacgttcaatttggataaagttgaatttagacattttattctccgttactctgttttgtttcgatgtagctatagtaacctagttgactactgatgtaaacaactttgtgaacaaattttcaaataattttagggaacctggagggactttctggagggtagaatggatttatatagccgtggatatagaaatgcccagacgacctctagaaggtatctgggctataattgcggtattatcgtatactaaaaagccccgtccgaagacagggctctgagaatcgacagcatcacctactggcagatgacctgcgaaattcattcctttggactcggaggcatcagtctcatccaaagaagtatagcgtcaggaggttatgcttgcgacagggaacaaccgactagcggcaatggacgaaccattctcttctatctgacgactcaacgagggcatacgcaagtttcccttcgaatttggtgccgattgcaggagtcgaacccgcgacatcttcattacaagtgaagcgctctaccagctgagctaaatcggcataagacgggaaataaggattcgaaccttatatagttgcacagacgtatctgccgttgaattcctcactaagtttaagcaactattcccaggtcttaatttggtgcaccgagagggattcgaaccctcaatccttgcggcgtagcattttaagtgctatgtgtataccagttccaccatcgatgcgaaatggtcgaggcagaaggattcgaaccttcgacctgcggattagaagtccgctgctctatccagctgagctatgccccgagattgttcaggcaggactcgaacctgcacgactgattccgtcggcgatttaccaccgtcgccagcatatgatgcaatatgcgagctcaaaaggtgtccgtcaccatgtctaccgatttcaccactgaacaagataattatattactgattatttatagcatttctcaaacgataaagttgattacagaattcgcgttcagtcaaaatcgtttcagaaattttgtttttgcccatactgtgagtgagcgtagcattccgggtagcagccaaagcttttctgaatccttcatttttactaagtgcatcgtatgctcctgttagtaaattctgatacgcttctgaggcacggtgaataggaacacctttccaataaagcgtttgtgttggccaccaacgtttcttcttacctttaaacttagcggactttccgactagtgtacatacatgtgcttgcatttcaggcgaagaaaatttgagggattgcaagaatccctccattgatgcacattctacgccatcatagataaatttatgaggagcgaaattactcaaagcacatgatgggtatgaactacctgaaccgatatccattacttttccttcacgtatttcaaccaatcaacttttaatgggctttctttctgcttatacgtaattccaacatggaatgcaaccggagcatcaggaatacggatttcttctttaatatcgaagatttctactttctcaaatacccgcatgaaatcatagtcgtattcaattggattacctagccaagcctgaatagcatacataacttcatttgaacaagaataatgattatctaaataagcatcaaactcttcgtctgtgcaatcatatgcaggaacatcaacgccaaagaatttcttggaaaattcaggagttacatacttctgttcagtgtgaagtctttcaagaactgcttcatgattataatcagcatttcccatatacacaccacggcggccattagaagagaaccattcaagaacatgaattacttgattaatctcttctttttctaagccataaaccatttgggtagaataccgatcagcatcgttttcccaagtggtaattgccattgctaagcctttaggaataacttgtccaaatttaatatgcattttaatttcctcagttgataatttggtgaccctggcaaagactcgaacatgcaaccaatcccttatgaggggaacgctctaccaattgagctacagggcctttatagaaatcttatgacttttataaaagccctccgaagagggcgccttgtcgggcttatccacctgctaggcagaattactcacacataaaatcagctacttcccagaagtcatttttaactgctactttaaccaccggagaaatttcagatgttttaatagaaacaattacatcacctgcgacagtttctaccagaccaacgattttctcgctgcgagcaacaaatttactcaccggatgaaatttaccggtagcagcgaacatagcttcttggtcaacaatcagtgcgatacgtttcattctttttccttgtttgttttgatgtagtaataataacaggttattcttgtagcattaaatctcgaaaatcgttccgttttcccacattgttgcgaacataggagaaaccttaacgaatgatttgcttcgcattgcaacgtagtcgttatctactttagccaatcctgaagcaatatcagtaatacggccacacttcatagaaccgcgaccacctttattgtatgtgcgttctccgtagaaaacgatatcaccaacttgtacttctcgacctttagaatctttcatcatatttcgcctggcaaatttgtttaaaatctaatacaagttgctctacattagtatcagctgttaacggagtaacttgccgcagtttattaattttacacccagagtgataagcaataacctcttgaatatcacgctcactgaagtattcatatttaatcagtgaatcatatcggcatttaatccatacccacatacctttgcgttcatcaaatgcatatgcaaagtcagcgttaatcattaaatcccgtttagcacaagatgaaagccctaatgctaaattaaccggtccatccaaagacagcttcaccgtaatagcatttacgtcatttgatacaccaataaaaatattcattctatttccttcgcttgtttttggccttcttgtcgtgcacgagaacgtcctgctttatgcagtgattcgtaatatgctcgacgtctatcaatgttttctgtacgatatgctttcccgaaatgggatgttttgaagccgtaatatttcataatataattctcattggcaagtgattggacggtatgcccggcctcgaaccgagtcacattgactttgcagaatccatgtgtttaatatatcacccatactcgatagcatatctgaacgagactgcaatcccgctactcagcttacaccatcttgtattgtgtcataccgttaagttggtctccatagaatgactcgaacattcgacctctccatcccaaatggagcgctctaccaggctgagctatacggagtaatttggagcatccagggagaatcgaactcccatcttctgggtggaagccagacataatatccgctatacgatggatgcaaatttggcaggctctgaaggaatcgaaccctcatcactgggtttggagcccagcataatagccgttatactaagaacctgttatttggtgggagtaactggactcgaaccagtcaccgctcgattatcggtcgagagctctaccaaatgagctatactcccatggaaagctaatcatctaattgttgatgtaccactgctatgggcagcgtttaactttcataaatttggcggagagtaaaggagttgaaccctcaccgtttccgatggcccggatttcaagtccggtttgctaccactagcgctactctccaatatttggtgaaggaagtgccatatagacacaattcgcttagcgacagccacagcgttttgcgggccgtgtatttttccaccattccttcattgttggggtgaccgatgggagttgaacccatgactacgagaatcacaatctcgagttctaccaactgaactacggccacatcaatattcactccatccatcatgaggacttcatacgaaattaagagaagaatgatcagttcaacccctgtagacgcgttgaatgaatattaatttggctggactatctggattcgaaccagagataccggagtcaaaggccggtgacttaaccgcttgtctatagtccaattgttggaggcggaggcaggattcgaacctgcgcgtgtcgggatatgagcccaacattctaccaactgaagttactccgcatttatccgggttcttgaagtactaacaagtagcttgatgtagaacacgctaaagatataatcttacgaatatagagcttattccgtgggaacaaacagcttcgtcctcggcattatcttacaggactcaaactcatcttcaagaactgccacgttcttatttggcggacctaacggaattcgaatccgtgactctcgcgtgacaggcgagtattttaaccgctgaaactataggtccataattcgctttcagagatactctggcacgatgccgaagcaaaggggaacaggactctcatcaccttggtaccagatgaatcttgtttagcactctgttctaagatgtatccctgaaagcgaactttcaacgccgtaagaaattataacatgaacaagcattaagcaggatgaaatcatactccttaatacaaacgccatgccagggaattctgtgccgacgatttatcagaacgtcttctgacttcttcatttggcgggccgtgcaggtatcgaacctgcctagtcatttctgacacggattaacagtccgtcgcttaccctctcagccaacgacccgaatttggtgggacaccgaagactcgaacttcggacacccggattaaaagtccggtgctctaaccaactgagctagtatccctaaatttggtggggagtaatggagtcgaaccactcgagccttttgagcaacagatttacagtctgtcccgctacccctacggtctaactccccatttggtaattttatttatactgccctgaaattaatcagagcagttgatagattaataataacaaagaaaacctaaagcatattacacaatcggtgagctctttgatttaaccaggaataccctatgtggtgaatccatatgagagagcaatacccggtgctcaggaattggacttgtatggaaaggaaccacacgataacctttaggtgtaaatcctagcaaaataccaacgcttgctgcagaaagtgacccaccacagtagtatgatactaaatcaccaggctggatttcattgtcaagagaatcggttttggtatgcttaggcgtaactaaatcattaggaattggaacgccttgtgcatcatagtattcatgggcaagaagcttataattctcttgatagaaagtattaaatgcagctctgatattcataacaatttcctcacaattaatctttgtatgcttcagttgaacctttagcaacggtttcaaatcgggaattcagtatctcaaaatagtcctgatacgttccctggagggcttcatagcattcttctactgtagagtagacacctctgatttggtcagagccaggagcaggataataattagaccaagttaaaagtgcatacattacttacgtttccagctgtagtgagccaaaataagaagcactgcaatagcaagtagtgatgaatgcaatgctgccagtagtgcacctagtcctacacccaaagtaacataatcatacttagttacttcttcacggtgtaaatcatagtttttgatgaaccactgcttaatctttttcatgcgctattttatccattatgaaagaaatgatacccattagaaatgcaacacttaacactgatactgtttcaggaagagacataaaggctgcaccgataatgccaaaacctaatgctcccatgcagatagttgatgcaacatttctaattaattcacaacgtttcattttattctcctcaagttgatagggttatagtatcactactacaacccgttgtaaacaactttgtgaaataaatttctatttcaaatcttctgaccagtccagttttagtggctcttggtactctctgtcaagcactaccggcacttgaacttcaccctcgaagtgagctggacctacattgtagctgagagtaatgtgcggtgagtaatctgggaaatcatgagttgctcccaaagctcttgcatattggtgacggaattttaagtattctgaatctagcttaagaactagcgtacgtccgtcttgtgtgtcccatacttcaagtttacctgatgtagcaacttcaaaacttcctgaagcgcaaacgtatggaacatgaactcttgaatagcatatcgtcgtatgaatcttatgacgaggtacaggattaggaaccttcaactcacgctgaaggtcctcaatagcatcaagagttttctcagagaatttagcagctacatatagaccagtgctaaaatcgctgaagttcattaggcatcagcttcttcagtagtttcttctgcgaactgtgcttcgatttttgcaaccaggtcgtcaagtttaacctgaccatcttcactgatttcaacgccggatacagcaatcagtttctgcagtacttcttcatactgtgcacgcagagcagaaaggccttggatagtttcagacaggtcaaatacacgaactttcagagtatcgacttgggcttgcagttgttcagtagtcatttttgaattcctaatatagtgttgatttttgaataaagttcttctagagaaccgtcgttagttattacgatatcgccttcgcgaatcggaagtccacgctctgtgacgtgagtatcttttttagaaccttcttgctcaggacgaactacatgaataactgtagcacccatcgccctggctacatcaagttcatggtcttggcgggtatctgggacaatgaaataatcataatcaccaaaagtatcagccataaccaaagtgaatcgttttacccaatacatgcgatcgagcttatcacagacaatgtcagtcccaagggtctgcatgagacgacgaattgaccatggctcaacaggtttatttattacaacttgacggatgacttccatcgtatcgccgtcaagaattttacgcttgctatcataaaccacaccaggtaaaggcaaatcatgatgaacatattcaatcgcgttcgccatgatacgaatcacgtctttagtagacagatttaaatcctgctcacgatcgtaatcaataccttcaatcattgaccgagtaatgcgaggaaactgacgagacgtatcacgataccactcaataagcatagcatcagctagtgcatctttaattggacccgctaactgatgctttgttgcattgtagttatccataatgtaatcagcagtagtgtctttgccactgcgttttttaccaatcaaaaataaaagcttcaaattattacctcatagaaggatgcattcccatgaccttttgctgatactgagattcacgagtatcattgacagaaggtctaccagtaattattataccatctttttcaacttcaatgtatttgtactgcaaagttgctacacataccatagcagggtcagattcttcagttaaagaatactcaatttctgacaaatcacttacccacccaccgatgtagcgaatagttaatacgatttctttcttatcgttatcaagcacatgcattaaaactgcaccaggaaatccttcaccgccattattccatccagactttcctcggtcaatataattctgacagcttaacatccatttgtacatttgtacccatgaatcaaggttttcgtctactaaaaatctaacaggaacagcgtcaaattcaaaggtagacccaggcaatttagcacgatgcatgccttgtggagaacccacagtatcagtagcaggaatatgaattccgggaactaccgccgtttgaagattagccttaaaggcctgagtgaggcccccgtcggggacctctagtataaagttagttgtgttagtttgattaaacaagccagtagacattatgatttccatacagaagtagcagaataacgtttgcctttcgacataaactgctgagttggtagcatgactacatttgcccaatcagctggttttatctcgattaaagcaccctttatattaccaggaatatatgctttaatcattttatcagcaccagcaaatcctttaacttggctccagtttatctttaacctggtcttattagatatcactggcgtattagcatactgtttcagaagttcttctaaaaactgctgacgagcctttggcggaatgtagtgaaggtttaacccatacatcagtgtggttgtaccttgctttcctagaccgagataaactatcaaaggaaatttatcccagaatggaagagtgtctttatgtttagcatcatacatgtaagcatatagctttccaggttgaggcttggttacagaatgacctctgatgtttttcttcatggtttcagcaaaccattttgcagatttattgtttactgctgctccttcattacgaattttatctttgatagagcttcgaaatgaatttaccattacaagagcacgctcttgtttggtcattttgttagcaggttttttctcaatttctgctactttaattgccgttttaattcttgatgcatgacgagccatagctttactgaacgtagcaggatttattcctttactttcagcaaatgattttgatgtcatgccttttttacgagcagcagagtattcaactcctaatgctacccattgattttcactacgggatttagctttaggcgattctgcagcttcagtgataaattcaaatatagccatcagcctttccatcctaattttttaagtgaatcttcggtaattaacctaaattctatacccattttgttggcggtagcttgagctgctttccacttatccacgtttacagaccatgtgtaaatttcatcaatgtaccgtttcttcgctgatgtcgtcaactttgtgggtttgaccggaggtctagtttctttcttcggcttaacttcaaaaaagaactgttgaccattagaaaacttagcccagaaatccatgaaataccggcgtttctttccatctgcattactaaagtatggaatgactacctcttcgctgttccattgaactacatctggatgattgtcaagccatctcatcatgtactgttcccacgtagaacgataagtaatctttctgaagtcgcctttatatttgtggagattctgcggcatgaatttgccggaatatgccatagtggcctccttataaatactgttattaatatttataagaggataaactatgctcttctcattttttagtccgatagattattctgcaaagaccgtaaaaggtgctaaggcaaaagctatcccaaccgctgacatatttcgtaattatcgcaaatatttcgacactgtagcagaaaactatcttttacaaacatattacataagtggagctcctagaccagaagaattagcatacactctttatggaaatagccagctgtactggattcttttaatgtgcaataatgtatatgacccattcagagattggattaaaacccaagatgcatgctatcaatttgcgcagcaaaaatatgcggatgtaggtggagaccaaatactctatcacgtggatgcgtatggcaatcgctattacaatctcgagcaatatcctgaaaattcaggtgtttggtatgataaaggggactttaatcatcagtatcctcaatatactggtgctttggctggtgttgacatttacgaagattctattatagaaaatgaaaaactgcgccaaataaacattatcaatcctagcgatattgaggcatttctttctgatattatacgagaaatggaaaaagcacctgacagcgaatacgaatcaggccggtacaaatcccagactaccatcggagaagttttatgattgaaatgaacgattcagtaaaatggtttactggtgttgttgaagacagacaagacccgttaaagcaaggaagagtgcgagtacgcgtttacgggcttcatccgtttgaaaaggtgcaaggagctataaccggtcttcctaccgaagaccttccttggatgtcagtgattcagcctacaaactcagctggaatttccggagttggctcgtctataactggaatggtggaaggaacatcggtatttggcttatggcttgatgaattcaaaacagcaggattagtaataggaacatattctgcgcacagaaaaactaagccaaactacacggaaggtttttctgaccccacaggtcaatatcctagacaggttggatcagataccaacccactagttcaaggcgatgaaactgggtatagtgctgtaccaaatataatccaggacagaaacctggatattggcattaatcctgacgatgctgacctaagtgatattcctgaagacccaaatcctgcaattacaataacagatatgcttaatagggacgaaggtcttagattaaaggtttactgggacacggaaggatatcctactgtaggtattggacatcttatcatggcgcaaaaagtacgtgatatgtctgtcattaataaaactttatctaatcaggttggtcgtactgttacgggaaatcctggtatcattacaatggacgaagcagttgcactatttaagaaagatcgtgataaaatgctttctgacattaaaacaaattcacgggtaggaccggtatatgctaaagtcaacaaatcaaggcagatggctttagaaaatatgagctttcaaatgggtgtaggcggtttagcaaaatttggtaaaatgcttgatgccatgctcattggtgattggaaaaccgcttatacagaagcaagaaactctgtttggtttaatcagacaaaaggtcgtgcttctcgtgtttccatgattattctaacgggtaatatggaatcatatggagttcctgctccaaagccagaaggaaaaagcctgtctgctgcttacgtagaaccaaagtctggaggtaatcctgaagacccatggactccggaagattcaagaattcttttcaaagaacctgagtcttcatataatggtcaatatccatatgtacatacgatggaaacagaatcaggccatatccaagaatttgatgatacacctggctatgaacgctatcgtattgttcacccaacaggttcatacgaagaagtagctcccgatggacgccgtaccagaaaaactgtagctgatttatatgacatgactcagggcgatggaaatattttaatctctggggataagaaggttaacgttggagggaacgagacctattataacatgtataatcgtcgacagcaaattgatggcgataacacgctttatgtacgtggaaatgaaactaaaacgattgaaggcaatggtactatttttgtcaagggtaacattaagatagtcgttgaaggaaatgctgatatccaagtcaatggtgatgccactactaaagtagatggcaaccacgacgtaaccgtcggtggtaacttaacttggcaagtagcaggtactgtgaattggaatgttggtggggcttggactgagacaatggcttctatgagctcaatcgcccaaggtcaatacactgttgatggttcacgaattgatgtaggttaatcatggctgatatacttcctattaataccacgttacgcgaagtaatagaaggtgaatacgttgagcagtactttactgctcaattatctaccaacgaaacattaaaatcaataaatattatcgactatcaaccagtatctgatatctctgtgtctgaaacctattataaaggtaattataactcggtttttacttttggaaacgatgtgcttaaataccgtgaaggcgatgagctgaagtccgcttcagcgtgggaggatttacctaatcccaaaactgctgatttatatctgtggaaagcccccagaacactagagaagacatttacctatacagttgagataatatatacagtgacagaagaatcgtctggaggttcatccggaggttctagtgctccaatcgtaacagaatataaaaagcaaaaggtttactctcaaaccgttaaaggtaactggagcagatggggcgaccaacttcgtgcttacgtatatgcggggaattaaatggctggtctttcatatgataaatgcgtaactgccgggcatagtgcgtatcctccgacagaagtaaatgctacacaaagtaaagtattcactggtggaatagcggtattagttgatggcgactcaattaccccacacaccaagacggttgaccctcatgatacgcatggaggagttgttcaacctcgcacatccaaggtatttgtaacaggcaaaaaagctgttcaaatggccgatccaatttcttgtggcgacactgtcgcgcaatcaagctcaaaggtattcatacactaatggctattaaagaacctttaaattatcagttaacgcgtactgcaaacgctatcccagacgcatttactggagcaacattcgacgaaattaaaaatcagcttattaactggcttagcggtcaaaaagagtttcaggactttgattttgctggttcgcgtttaaacgtgctattagacttattagcatataacacgctttacatacagcaatttagtaatactgctttatacgaaagctttattggaacagctaacttgagaagttccgttgttcaagcagctcagcaaaacgggtatttgccaagttccaaatcagcggctactgcatctattatgcttgaggtaactcatccaaatccagagccagcaataaaaatacctcgtggaaccaagtttttagcatatgcacgagattcatcagtagacccatacaactttgttgttactgaaaatgttattgcgctaagagatacttcagcaccagaaggggttaatagatatcttcctattgtcaatttggcgcagggacgtattattcgtactcagttgtcatatgacccgaagaaacctattgttattcgcgaccaatcaattgaccgcaagcaggttaagctgtgggtggatggcgctgaatggactaactggacagaccgatcaatggttcatgcttcgtctatttcaacgatttattatatgcgtgaaaccgtcgatggaaatacagaattcttctttggcgaaggtgtggcagaagcatccgtggcaggaggagttcttgaaagcaacttcattggtggattaaaacccactaaaggcgcgcaagtcgttattgaatatattcgtactgatggtgaagctgctaatggtgcgactgatttcagctatgctgataccctgcaatatatcgtagtaaacaaaatcattgaaaactggtcagattctcctgattatgttggcgctgatggcggtggtgaacctgaagacatcgagcgtattcgtgagctcgcccagattaagcgcgaatctcaaatgcgttgcgtgtctaaaactgactatgaatcattcgttagttcacgttttggttctatcgtgcaggcagtacaatgctttactgatcaggacaaacccggatatgcatttatcgcaattaaaccaaaatctgggttgcagttaactgcggttcaacgtgaagacattcaggattatctaaaacctttctgtcttgctccgattactccttcggtaatgagtccagactacttgttcattcgtcacaatattaaagcttcttatgcattgaataagttgcaagaatcagagcaatggttacagtcaaaaattatagactcgattaatagatattatgttgatgaagttgaaatgtttaacaaaaatttcagtaaatctaaattgttgacttacattgatgacactgaccactcaatcatcggttcttctgtagatatacaaatggttcgtgaaattgtcaactatttcactcttcctagcgcaggtattaaatactataatactattactccgcggacgttacgttctggtgatttggtctttactgttaccccaactgctgaaccgtattcagttaatatcgttggaactgacccagataaaaatggcaaaggaaatatggttattggaccgtttaagccaggtgacattaaagagaatactcatattcagccatatactgaaaacgattttgatagaactaccgtcggcgaaagaactcgttggtacaaaatcggtgaagtagattattatggtgataacatttactggagccttggagctattggagccgatcctcttcagtttgaagaccaaagtattgagctttattctactcctacccaggatatcgtcttcgcccgcgatggaacacttatcgtatttgagaatgaccttcgtcctcaatacacaactattaaattggagcctattactcaatgacaattgcaccgttcgtcaccagcttacgaattcataagctatctgcgaatcaggtcaatattcgttgggatgacgttggtgcaaacttctactattttgtagaactggccgaaactcgaaatcaagcgggggaagttatccccgctgataatctgagctggtcttcactgggttataccgcggataatgattggttcgaacaaaatcgtattgaaccgcttacttactataaaatgcgtgttcaaactacgtcggcaggttttgaaccgtctgaatgggttgaaacagaagagttccaaacttttgaagaaaacgcatatacgtttgaacacatgcaagaattcagtttagtgaaagaattcattaaacagaagttttctttaaacaacatgtcgtatgttaacttcaacacatctgccatgatggcatctttgatgactgagtcttttcagtttagtcctgaatattctcatttatcagctattgaaaacttcgttgtaggtgaatctggatatcatgaaattcagggacctattgaagcagtgtgtgttgataaaaatagaactatgctgggagaaatagacggaattttgtatctgtttgaaagattccaacatatggttaaagtatcaaatgataaaggacagaattggcaatacgttcagttatttaatgaccgtgtcggaaatccggtttctagagtggtaatttatcaatctaaaactacttcttatgttttaggatatgataaaatcttttacggaaggaaatcatctgacgtacgttggtcatcaaacgaggttaagtttagcgataacgaagttacatttgctaaattgggagaccagttaaagcttggctttgaagtagaattattcggaacgtatgcatcattgcctgctgacgttaccaaatatgcggaagcatttacttgtaatgacgactatttgtatgttgttgcaaaagacactgtccgtaaagttaaattaaaagatgctccaatagacactgatcctttaagtcctacatttggtgaaaaagtgtttgaaaaggaagtatctcatataacaggcaatcctaaatcagtatgctttaaaatggattccgttggaggcaaaatctttgcccttattaccggggaagttaaaaccttaggattagacccaacagacccaaggaacgttgtggattctgcaactaaaggcgtctatgtttaccaagaaggcacaaatacttggaagcgtgtatttggtaataccgatgaagaaaaacgtcgtatagagcatttatggacttctatgtcaactgacggaaaggaaatattcttttcatcagctaatttcaagacgacagagtatgttcaggatattgaacttgagacaaaatacccagaactaatttctaccgcagtaaaaaatgttaacccaattcagtatcactctgataagcattatcacatgatgagtttcagagcagatgaattttcaagatgggaaacatttgttcctggaccgatgaggttttatgctgaaccttggtttgtctggatggctcgtgaaggcaacagatgctggataagtacagctgaccacgcagttgtcatttataatgatattctttatcagaaaagaatagatatggctgcgcagggaactactgagcgtgttctttcggaagtgtgggataaaggtgacgcaacgttttattgccctccggtttcatttaacggatttttgcagtatgcttctggcatcatgtttcacgaaccagacggaaaactgataggctattatgcattcgattatcgtgttcgtgaccaggtaacgcttaactggaaaccaactgatgtaatgtttaaggcgtttctgcagaaccaaacccgtgaagaagactggactcctgaacatactccaggcttgcgtgacccggatttacgtccgtatcttactaaaatgatgccggatagctacttattgcaagatagtaattttgagcacttttgtaagtattatctccaattcctttcagacggaaatggaacgcattacaacagtctcgttaatcttgttaagaacaaatatcctcgtgaagaaaatgcatgggaatatctgtggtcagaagtttataaacgcaacatttatctgagtaaagacgctcgcgatgctgtcgtccgtttctttgaagcgcgcaagaatgatttctatgctaccaaaggaattgaagactcatacaagttcttgtttaaacttctttataatgaagatgttgaaattgacatcgagtcaaagaatacgacagaatatgacattattgtagagagtacaaatatttctgacgatttagttggtcgtacgatttatactgcttccggtcgtagtaatgtgacttatatcgagagagaataccgggatggtcgtctgttatggcgtattactattcataacttatcaggacggttcattgaaggccaggaaattaaatcagagcgtacggactttgagggtattatagttcaaggtgttcgtggaaaggatatgctgagtaataacattgactatataaaccgcagccgttcttactatgttatgaaaattaagtctcagcttcctacttctcggttccgtgatgatgtactgagatttgttcatccggtaggtttcggtttcattggtataacgttgttgacaatgtttatcaatagcggtttaaatatgaagcacgttgagactatcataaataaactcaagaactataaatgggatgcaggactaccatcagtttatcctgatagagttgctattatcgcttcagatgatacaatagaaagagacccaataactaatgagcctaggtattcttcaaggactcaagctggtgaacctttcccgttacctgctaactataatcaagaaaataataacagcattattgctggacaaaacccaggacaacgacgtaagccgttgagccctacatttgaccaatcagcagtaacgtttgccaattatcgtgatttagttaaccaacgtcttaaagacgatgcaggtaatcctcgcgatcctgaaaatccgacacaggtaaaaattgatgagtaattcaacaagagcaagttcaacgcgtagcacgatttatcgtgctatcattacatctaagtttagaactgaaaagatgtacacattttataaatcaattggtccgggaacggaccaaaacacattgtatgtttcatttggaaaaagcactccatggtcagataacgaatctgaacctggatttgcacctccataccccgctgataatggagatggggtagttgatgtttggacaaatatgatgggtgcagtcaaaattgaatcatctatgcttgactgtgttgttccaagaagagactggggagatacaagatatcctaacccgcgcacatttctaattggcgatatcgttgttgctaactctgcgccatataacagaactgatgctggatttggatggatggtatatagatgtattgatgttccaaaagatggaatgtgttcaattggaaatcttacaagcaaagatgaatgtattaagcttggaggtaaatggacaccatccactatttccggttcagcgcctcgtgggcgtggtgatgcaaatggtaccgtcgatttgggtgatggatatctttgggaatatctatatgaaattccagccgacgtatcaattaacagatgcacaaatgaatatatcgtagttccttggccagaagagattgaagaatctccagctcgttggggatttcaaaacaacttaacttggcaacaaaacgactttaacctaatctatcgtatgaagtgtaatacaattagatttaaagcataccttgatgcaatttattttccggagtttagtcttccaggaaatactgggtttaggcagttgtcaattataactaatccgcttgaagttaagccaatgccaaattctcctaacgttaaggctgaaaaaggttggtatagcgcttctggtcttgaaagacagtcaggtgaaatgatttacatggaaaatcggcaacctattattcgttcaatggaccaaacggaagaattaaacttaattttcgagttttaattatggggagcctttggctccccatttttatataaataggactatactttgataagaggttactactatgtatgtagatgaaggtaaaaaggttattgacgtcggtgaagtaggtaacgcttctacgggcgacattttatatgctggcggcgtcaaaataaatcaaaactatgacgccatttataacgcatttggagaccagcggctatttgctgcagggtctggagaaggaagtcaaaaaattcacgcaacgagctattatcaaaagataaaatttggtgatgctaactctgcagggacagttccaatgggggcatgcatagatgctgactgttcagaaggtgcagttcaaatacgtctttcaaaaggtaaagcgggagaagctgtattcatcgtaaatagtaatgggtcagcatcaaaatctagacccataaaaataacaacaaacggtgaaggcgtagctgatgcatttaaagatggatcgcgagagttagttattaataccccaagatgcagaattgagctatggtgtgttgaggtaaaagctaacggtgctgcagtttgggattattcgatttcaagtatgtttggcagcacatattcgccgttagaagctacgtataatttaacgagttctcctattaatatccgcattggatataatgatgattactctactgttaaattgctattaagcttcagcgcaaatccaggtggtcaaaccatcaaaaggcaatcatctgaagtcatgcttatgattgacccgactattacttcatcagcgccaaacggaagagtatttgacactgaatatgcagtgttaagaagtggtgaatcatctgaaaatgaaaagatgtattctatttcatactctattaacgcgcagaaagatttaatatgcacagcttcaacatcttatggaaacgcacgtttggcagttaaagttattgctacacagaccgtaggggtatctcaataatgaaacaaaatttgatagtaggccaatcagtagatgatgggtctggtgattacctccgtaaaggtggtcttaaaattaataacaactttgatgatttatattcagagttaggtgatggttcagttccattcgcagcaggtgcatggaaaacttttaaagctagccctactggaactactttaaatgctaagtttggtcaggcctttgctattaatacccaggcagcaagagttaacgttcagcttccaaagggtacagccaacgactataacaaagttattaaacttcgtgatgtttggtcaacctggcgattaagcccaatcacagttattcctgctcaaggcgatacattaaaaggttcagcttctcctaaaattttcaacactaacttccaagatttggaattagtttattgcgcccctggccgctgggaatatattgaaaataaaactgtagataagctaactaatggcaacttaagtactgtagcgaaaaaatcaattattgctactgcgggtcagactgactttcttaacatttttgatggcgtagaatacaacgaagactcgcttaatgtatatcgccgtggtaatattttatattacggtgaaaccagcgttatggataaagccaatgctgattacggttctcctggaacagtagcaggtcaattggtagaattaaacggtaaagacattcgtttaaaagttccatgtgttgaaggggaagtaataacatttgaaaccttcctagatggaattggtgtttatcggtcttcatacaacaagttggctatccagatacgagattcagcccagactacatcccagacgattcctgggtcaatgatagtagataaccttgctactctccgcagaatcactctggatgacatgggtgtacttccaggcgtaggggtaaatcctaactcgcttgaaatttcattgaacggaaaggaattacttgaagctggaactgctggtcttcctttattttattgtgaaggcgcggaaggcggatacgcagaagactgtataaacaatggtggtcaatgggtaaattctaaccaagattatagactggaatttgactcaactggtactaacgtcgaagctattatttttggtgaggcgtttgaagataaagaccttcttaccgtccgttggttcaataataacatcggtactactatggatattgacgatatcatggcagaaaccgaccaagtgtatatgaatgctgagcaattggtaactctaaaaaatcgcattgaatacacaaattatgatgaaccaaatcagaaaaatatgcgtcctgtcgctgatgatgttatgattaaagtcaataacattgcagcattctttgacgtaatttatccgattggcactatctacgaaaacgcccacaaccacgcaaaccctgctgactatatgggatttggggtgtggaagctttattcacaaggccgtgttactgcgggctggaataatgattcatctgacccttattttgcgcgtaacaataataacttaaacgaaaatggtcagccatcattaacagcaggtggaacggttggagatttgacatttacgttaggaaaagaacacattcctgaactaatgtcaagagataaagttctaatttcagaccctgaacatggcagcgtagttattggcggatgtcaattagacccagacgctcaagggccaggttattctaaataccgtgaagacactgttgcagtaaacaatggtgtagttccaaaggacatcactaaaattcagccaacaatcaccgtttatcgttggattagggtaggttaaaatgactattgaaactaaaactcgtgaaggagctaaagttaattcaagattaactgctttttcggaatatcgcgttgacccgcaaaatatcgcggtaggaaataaggctcctatagggagcctgacctttgaacaaatggatttgggtgtttggtatccaaacaccgaagctgctattaatgatttaatgtcattacagtcagcagagattggaactattgtttgtaatgacaccggaatatctccacaaccagcacagcaaattacacgcgctactttttcaggtgtagtttcgttagaacctaaagaagacggttctgttggtgacccagtaataattcatattctcggattgccgattagaattgcgaatggtgatgacttcgcagctgtagcaacacgttggtatgataaagtaaaagaattagaagctgttggaaaggtggttcaacaggttactcaatcacctgcaactcctcagtatgttgatattattcatctggattatcagaaccataattttgaaacatataaaaagtatggtttaactgttgagtttactattacttcacctgctaaagcgggttatggacaatgggacgctattggtaacgaaactaaaaccttcggtgcaaacacatttacattccactattttagaaggatgggataatggcccagaataactataatcactacagtgatttggccaaatatacgatatttgacccagcaaatacccaatggccagttgctacaaaagacgtccaatcagcgttagcgttgattggcagctgggcaagaactgacactggattacctgcagcatctccaacagtagcaggtataattcgtacagctacacaggccgaagttgaagctggaactgtaggtaatgctgcggttaccccagctacattaaaatccacaattactcggcctgaagcaactaccgcaattcttggcttaacccgatacgcaactaatactgaagccgcagcattaaccgcaggaaatagaactattaccgcggcggctctcggtcatgtgtttaaaactgtgaaagccaaagaaaacgtagatggaactgttaggttaactactgcggctcaagcacaagcaggaactgacgaaactaccgcagtaactcctaagcgtgttgtagaaatgattggaaagttcagtgtcagtcctcctagttatacctctgcgacagaaagcaacttgggattagttcgtgtcgcaacccaagcccaggtagcagcaggtgctgttcacgatggatacgcagtaactccaaaaaccttcatggcatcaaaagcgtctgacagtgtatttggtatagtaaaatttgctaaagactcagatgtggcttcagctacttctaacaatttggctgttactccaaaaagtcttcaagcgctaaaatccaccaaggataaatatggattaaccagattatcaggttctccaactactgatgcttcattggcggctgctgcaacagatgcagtctttaaaactcgtagaataaacggaaaaactcttgataatgacataacaattactaataatgatattaattgttatacaagacaagaatccgacgggcgctacatgccagctggaactagagtaggtaatgttacttgggttgaaggacaatcttggattagccgaggtacaacgtttacatgtaattcaccatgggaagctcctagtaaattagctttaaatgttaatgtaaaatttgagcgtaacaacgacggatatgacaatcgtattttcaaatgtgttttaatagttaatggctcccaatggggaggtgaacttactcttaacattgaaaatactaaaggcggacgaaatggtcattcatggagatttgaagcttacgcatctagcaactttttcttctacgacattcctccaaatgccactgttcaaataagaccaatagaagacagccgtattatattttatgactgcatgcttacattctgcacaaatagaccgtaaggaacaatatgaccaaactagtagattcgcttccgttcgtagacggaattccagacgattttcaacagagaattaactggataaaaaatacagagcctcttaatggggcttcaacccgctatggaaatgatggagaactgaatagagcctctgtgcagattcagaaaaatgtggttcaagtacatagtgacttgaatcgcgttggagctgtagtagaaaatgttcaagtagatgtagaccaaatcaaaaaatcgttagaaattacaggttcttctgacgctattgagcaggtttatatcaataaaaagaatattgaaaagcatgatgggcaaattcttaaattagaagaagacactgaaaaacttcgaactgatcttgattttctcgaagaggatgtaggtgtttatgattctagtaaagatgattattacagaacagttcgtgataatatagtttgggttaaacgtgaaattggtgcgtatcctgggcaagatgttaacggacagcctaagcaagacgctccaggttctggtatgaaatatcgaatcatcaataatgcgtcagctatagtaaaacatgacgagcgtattcaggcgctagaggatgcgtacaatgattcagacgtaggttctctgactattgaagtaaacgacctgcgtaaagaagttggtcctaaatccggagctacgtcagcttcaatttatgcaaggcttgtgaataacgctgatgctatttccgcagctaataatgaaatctttgctattaaccaagccattgattttaccaatccagtaaaaattggagctcgtactactagattagaaaacgattatcgtatagttgatgctacactaaattcagcacagactgggttagttcctcgtgtcaataatattgatactcgtttaggttcttctgataaacccgatagtattgaaggaaaaattagttctctttcaactgaccaagggtacatttctgatgtagtaggacgtgatacttcatcggggcttcaaggccaagtagcatggataaatcagcaagttggtattgttcctagtggacagcaagttcctccggggtcaattttagcgagaatgacaaatgttgaagggatgcaaaactctcagcagtctgctatccaggacattcaagtagaaattggcaataacagcgaagggttaaaaggttctgtatttacgttacagactcaaatgaatggtgacttttcgtcagaaaatccggttcagcgggatggcgtgtatgccactgtagtagaattgcaagataaattcgtgactgcagttactgacgtagaacaagatggagcatacctccgtaaacggggcgaatggtttaagaagccttcatcaataggtgaattcagtaaagaagatttcactgttgatttaagttctgatgcattggtaaatcctaactcattggtcgctgcttcattcaatgctggcattcgtattgttgatgatattattgttgatgacgatggcgtattttgtgtagaaactgatacagttatcgaagcttctgattcagataaagccgtccaaattgttattctcgtcaataacattgaggtgtttacttatagcctaggtgttaaagcagtaaccggcgagcaactgttgaaaaccaagaaacttattgagttttcgtctggcgatgcaatcaaaatcgtgtatagagctgcttcagaagaatcaaaagttcctgttagtattaaatcattggatattactattcatccagcagtataatgaaagggaccttcgggtccctttttcgtataaatagaatataaagaggagcttatatgtcatacaacacatacaacccaaaaacgcttaaagacgctatacttcgacgtctaggagcgccggtaattaatgtcgaagtaactgaagaccaaatttatgattgtattcaacgagcattagagttgtatggtgaataccactttaacggattgaataaaggctatcaagttttttatattggaaaagatgaagctgacaacgcaagatttttaaatggtgtgtttgatttgcgtggtcgtaatgtatttgctgtcactcaaattgttagaacaaatgtaggttcattaacttcaatggatggtaatgctacttatccgtggtttactgactttttaatgggaatggccggaattaatggcggaatggggtcaagctgtaataagagttatggaccaaacgctttcggtgctgacctgggctattttactcaattaatgacttattggtcaatgatgcaggatttgcttgccccacttccagactattggtataactctgataatgaaatgcttaaagtaatgggcaacttcatgaagggagacatcattgtttgtgaatgctggactaaatcatttatgaataccgacatgatggtaggtaatactgcaagttacggcttcgctggtgaacaaacttccgaccattggggcttaggagataggtatcagaatcctaaccttcgcaataacggccaatatgcaggtgaaggtaatacaaatagagaaggtgcttataataatcgttgggtaaaagattatgctacagcactgactaaaaaattgtggggtgaaattctgtttaaacaccaagggctacaattagccggcggcgttacagttgatggtcaaacacttaaagtagaggcccaagaagaaatcgagaggctccgagaggaacttgatttacttgacccgggttgtcctattctgttggggtaaaagatgactacatttaattctagtttattcgctcgccttgaggattaccgaggatacaataaaactaatgagacagaaattctcaatccttatgtgaatttttataatcacagaaatagccaaacactagcagatgttttatcagctgaggctattcaaatgagaggaattgagttttatttccttcctcgcgaatataacaatccggatttgcttttcggagaagacccatcaagtaaattcaccaaagcttggaaatttgctgcttatttagattcatttgaaggatattctggtgataacacgttctttagtaagtttggtatgatggttaatgatgaagtcaatctgactattaatcccaatttattcaagcatcaaactaataattctgaaccaaaggctggtgacctgatttattttcctatggataattcgttatttgaaattaattgggttcagccgtatgacccattttatcagttaggtcaaaatgttcaacgtaagattactgcgcagaaatacatttattccggtgagcagcttcaaccagaattgcagcgcaatgaaggaattatcattcctgagttctctgaacttgatttagaaccaatcaaaaacattgattctcttgctgatatttctgacgtgcaatacgcagaaagcgaggcaattaataaagaagcctctgaatatgttcatccgtattatgttaataacggaagaggacttgagtctcctcctaaagcagattcgtttgatgacggattttttgaataaataaaataaagatgggacctttgggtcccttaggagaaatcatgtttggacattggtataattcgtccttgcgccgatacattgtattgctgggagatttattttctcatgtacaaattgctcgttggcgtgaagacactggactaaaatatattaaagtacctatcacttatgcttcaaaggaaaaattcctttctcaactcggaaaatggactgctatccagtctaccgagaataaagcaaagatagaaactgttttgccaagaatgaatttgcacttggttgatatgcagtacaatgcgatgtataaaacatcacagttgaatagaaccaaatcatataaaaccccttcaaaaattacatctcagtataatcctactccgattaagatgatttttgaattgggaatttatacacggaaccaagatgatatgtatcaaatcatcgagcaaatcgttccttattttcagccgcattttaacacgactataactgaactttacgacaaagacacgagctttaatcgtgatgttagaattgtattacaatcattttctcaggatgaagctgttgacggagataatattactcgtcgtagattagaatggtcattgatgtttgaagtcaacggatggctatatcctcctgttgccgaggttgacggcgaaattagaaccatttatttggatttcttcgctaatagtaaagaattaacaccagaaggaaattttgaatctgtggatagcgaagttactccacgtgatgtccagcaagaaaactgggatggttctagtaaacaaacttattctcacgatattcctattccggtaaatccggaggctcctggaccgagaggtgaaaaatgagtgaattacaattagatatggctaaattattagacatcgaaggaattcctggaatagaaggacaagaaattccagtttatgaaaaacttgaattagttgaagttaaatctaatccaaatgaccgtaaacctgacctcgaagatgactattcggtcgttcgcaagaacatgcacttccagcaacaaatgttaatggacgcagctaaaatatttttggaaactgctaagaatgctgactctcctagacatatggaagtatttgcaactcttatgggtcagatgactacaactaacaaagaaattcttaagcttcataaagaaatgaaagacattacttctgagcaggttagtactggaaaaggagctaatcctcaacaaggaatgaatattcaaaacgcaacagtctttgtagggtctaccgctgatatgatggatgagtttggagacgcctatgaagcacaagaagctcgagagaaaatagtaaatggaacagactcaaccgtttaacgttctgagtgatgcacatcctttaaatgacggtaaacaagtggttattcgccatccgtctgaaatggaaacgaaaattgaaaatggagttcgtttctttaaatcgcaatgggatgataagtggtatcctgagaaatttgaagactatcttaagctgcacgggatagttaaaattcgcctgcaaggtgaagacccagcgcattttcaaacgtttaaggataaaaataataagcgcactcgttatatgggattgcctaaccttaaacgagcaaacattaaaatgcaactaacccgtgaaatagttgcagaatggaagaaatgccgagacgatattgtgtacttcgcagagacctactgtgcaattacacatattgactatggtactatcaaagtccagctccgtgattaccagagggacatgctggaaatcatggcggctaaacgtatgacttgttgtaaccttagtcgtcagcttggtaaaaccactgtagtagcaatattccttgcgcactttgtctgttttaacaaggataaagcggtaggtattcttgcgcacaaaggctcaatgtctgcggaagttctcgaccgtactaagcaagcaattgaactgcttcccgactttcttcaacctggcattgttgaatggaacaaaggctcaatcgaattagataatggttcatctattggagcgtatgcttcaagtcctgacgccgttcgtggtaactcatttgcaatgatttacattgacgaatgtgcgtttattccaaacttcatcgatgcatggcttgctattcaaccagttatttcatcgggtcgtcgttctaaaattattatcacgactacaccgagtggattaaaccacttttatgatatttggactgcggcggttgaaggtaaatccggctttactccttatactgcaatttggaactcagtaaaagaacgcctatataacgacgaagatatgtttgatgatgggtggcaatggtcacttcaaactatcagtgcttcttctcttgaacagttcaagcaagagcactgcgctgaattccatggcacatccggtactcttatttccggtatgaaacttgctaatatggattggattgaagttactcctgactcacacggattttataaattcaaagaagctgaagcagaccacaagtatattgcaacccttgactctgctgaaggacgagggcaggattaccatgcactaaatattattgacgtaaccacatctgagtgggaacaagttggagtattgcattctaatacaatttctcacttaatcctcccagatatagttattaaatatctaatggagtacaacgaagctccgatctatatagaactcaactctacaggtgtttctgtggcgaagagtctttatatggatttagaatatgagaatgtcatttgtgattcaatagttgacttaggaatgaagcagacgaaaaggtcaaaggccgtcggatgttctgcactaaaagaccttattgaaaaagataaactcattattcaccatcgtgctactgttcaagaatttcgtactttctctgagaaaggagtatcctgggcggcagaagatggatatcatgacgatttaattatgtcactcgtaattttcgcatggttaacaacacagcaaaaatttgctgatttcgtggataaagatgaaatgcgattagcatctgaagtttttaaacgcgaattagaagatatgaacgacgattacgctcctgtagtgttcgttgacgccgtgaatagcgcagaatatgcgcctcaagaacatggtctttcatttgtataaataataaaaagcaaacaacattgaggatatatcatgcctttagtctctcctggaattgagctcaaagaaacgagcgtacagagcacggtagtacttaacgctacaggtcgtgccgcaattgtcgggaagttccaatggggtcctgcatatcaagttacccaaatcactaacgaagttgaactggttgatatgtttggtggtcctaataaccaaactgctgattactttatgtcagcaatgaactttctgcaatatggtaatgatctacgcaccgtccgtgtagttaaccgtgaagctgctaaaaacgcatctccgctggttgataatattgaatggactatcactactgctggtagtaactatgaagttggtgataaaattacggttaaatatgcagaccaaactgtagatgacaccggttcagttactgaagtagatagtgacggaaaaattaagtcggtgttcattccgacatcgaagattattgcatatgcaaaaagcattaatcaatatcctgatttagggtcttcgtggacaactaccattacttcacagagttctggtgtttccgctgtcattactttaggtaaaattatttctgagtctacagttttactgactgagcatgaaactgcccatgaagaaatgacaaaaaccgaattccagactgctcttgctaagtataaaatgcctggaattgtagctgcgtatcctggcgagctcggaaatcagttagaaattgaaatcgtatcaaaagctgcatttgataaaggcgaacaactgacgatttatccgagtggtggacagcgtgcatcaaccgcaaaagctgtatttggatatggtcctcagaccgatacgcagtacgctatcattgttcgtagagatggcgcggtagttgaatcaacggtgttatcaacaagccgtcaagataaagacatctacggaaataacatctttatggacgattatttctccaagggttcttcacgctatatatttgccactgcgcagggatggcctgaaggttttgctggtgttattcgtctgggcggtggggtttcagctaatgaatcagttactgctggcgatttaattcaaggctgggatttatttggtgaccgtgaagcattgcgtgtaaaccttctgattgctggtgcttgtgccggtgaaacagatgaaattgcaagtacagtacaaaaacacgtttcgtctattgcagatgagcgtcaagactgtttagcactcatttcgcctccaaggtcaacgattgtaaatattcctctgactcgtgctgttgataatttaattgattggcgtcaaggtgaaggaagctacgactctgcaaacatgaacatcaatactacgtacgcagcaattgatggcaactataaatatcagtatgataaatataacgacgtaaaccgttgggttccgttagctgctgatattgcaggcctgtgtgctcgtacagatgatgttgctcaaccttggatgtcaccggctggttatcgtcgtggtcagattctgaactgcattaaacttgcgattgaacctcgtcaagcacatcgtgaccgtatgtatcaagcaggtattaacccggtaacgggtcaaggtaccggtgatggtttcattctgtttggtgataagactgcaaccactgttccaactccgtttgaccgaattaacgttcgtcgcttgtttaacatgctgaagaacaacatcggtgattcttctaagtggcagctgtttgaattaaacgataactttacccgtagttctttccgtatggaaaccagccaatacctcgcaggtattaaagcgctgggtggtgtatatgacttccgagttgtatgtgataccacgaacaacactccagcagttatcgaccgcaacgagtttgtagcgagcttctatatcaaaccggcgcgcagtataaattatattacgcttaacttcgttgctacggcaactggtgcagatttcgatgagttgatcggaccacaataaattgtacattttcgctaaatcctgatacaattgcacatatgaaatattatgtgcaattaaggaaaaccaagtgattatctctaaatttgttaaagtaaaaataattcctaaaaattttaaatacttttcggaacttggatacaagctgtctcctctgggttcgcctaggcatggattcaaatattattcaattgatatcagtgttgaccatcttgaacctgggtcaaacatatatgttgagtgtgtttgtgataagtgtggtgaacaatattcgcagcgatattgcagagacaccgacgtgtgctatgattgccgacatgttaaagccatgactggcaacaagtatggttccgcgaacaaagggaaatctgttgaaatcatgcgtggagaaaatcatcctcgctggaatccaaataagacagaatataatgaatatgctagtaaagttagaagagaaacttctaagcataaaccaatttattctaaatgggaaaattttgataagattggactatgtggaatacctggagcgtatcagttagaccataaagtttctgtcgcgtatggattttacaacaaagttcctcctgaaattataggaagcattgacaatttagagataatcacttgggaagaaaatcggtcaaaatcaaaaaaatctagtattgatttatgggatctattgaaatgaaccccaggacattctggggtcatctaatctttagatgataaattatattaccgcacactttaatagcctctacgatgatgtagtcaatcgagaggctatataaatatctataggaaacaacgatggaattaacagacatcactcgtgcgtttgaatctggtgactttgcgcgtcctaacctgtttgaggtagaaattccttatctgggtcgtaacttcagtttcaaatgtaaagcagcaccgatgccggcaggtatcgtagaaaaagttccagtcgggtacatgaaccgtaagattaacgtcgctggtgaccgtacttatgacgactggactgttaccatctataacgatgataaacacgaagtacgtaaggcaattattgcttggcaggctcaggcccacgctcaaggcaatgatatctctggtatgactccagctgattacaaaaaagttgctactgtacgccaatttagtcgtgatggcaaaactgtcacaaatgaacacaccattactggtctgtggccaactaacgttggtgaagtacagatggactgggacagtaataacgaggtagaaacgtttgaaactacctttgccatcgactggtgggaataatgctatggggcttcggccccgtatcgaagttctgtgagttatttgcttaaatatctgacaaaacttcgatataaatatacttatagataatttcggagactccaatggcctttcatattttggacttattcgctccgtgggaaaaacgcgacgaagctgaatataagcaacaaatcaacaatgacctagagtcaatcactgctccaaaatttgatgatggagctcgtgaagttgaatcaaacgaaaacgaaatccagtacaattcattcaaccaaatgatgtttggttccaatgaacctggaatgaaaacaactgctgatttaatcaacacttatcgcagtttaatgaataactacgaagttgacaatgctgttgaagaaatagtttctgacgcagttgtatacgaagacggtcacccagtagtttctcttgatttagattctaccgacttcagtcaagcaattaaagaccgcattcttgaagaatttaatacagttttaacatgccttaatttcgagagaaagggcgctgaccatttccgccgttggtatgttgactcaagaatattcttccataaaatcgtcaacaccaagaaaatgaaagacggaattcaggaactgagacgtcttgacccgcgcaacttacaattcattcgcgaaatcgttactgctgatgatgctggtactaaaatcgttaaggggtacaaagagtatttcatttacgatactggcaaagaaagttattatgcagatggtagattatattccgccggaacgaaaattaaaattccacgcgatgctatcgtatatgcacattctggattagttgattgttcaggtcaaaacatcatcggttatttacaccgagccgttaaacccgccaaccagttaaagctattagaagatgcgttggtaatttatcgtattactcgtgctcctgaccgtcgtgtgttttacattgacactggtaatatgccttctcgtaaagcggcagcacatatgcagcatattatgaacacgatgaaaaaccgtgttgtatatgatgcatcaaccggtaagattaaaaatcagcaacataatatgtcaatgacagaagactattggttgcagcgtagagatggtaaagcagttactgaagtagatactcttcctggtatgtccggtatgagtgatatggatgacgtccgttactttagaacagcgttatacatggcattgcgagttcctctttcgcgcatgccagatgcaaataatcaaggtggtgtgcagtttgatgctggcacaacaattactcgtgatgaacttgattttgccaaatttattcgtagattacagcataaattcgaagagattatgcttgatccacttcgcactaatctaattcttaaaaaagttttgtctaaagatgagtgggaagacgaaataaataatattaagattgtgttccataaagattcatatttcaccgagttgaaagatgctgaagttatggagcgtagaatcaatatgctcacaatggctgaaccgtttatcggcaagtatatttctcataagacagcaatgaaagatttccttcagttgtcagatgaagaaattgaacaagaagccaagcaaattgaattagagtctaaagaggctcgcttccaagaccaagaaaatgaagaggatttctaatggaaaattatatttccgcaattgaatccagagacctcgtagcagccaaaaaagcttttggtgcaattatggctgaacggacatctggtttaattgaagagcgcaaaaaatttatcgcagcgtctgtcatgattgagggtgaagagcccgatgaggacgaagatgatgacgacgaagatgaagataagtctgataaagacgaagacgacgaagaggacgagtaatgcttatactgcctgaaaatcatgaattagttatcgacgctgtcgaagcttttcttcctgaagcacaggcacgttttgataagttgtccgcagcgctttctaaagatgatataaataaaattgtagagaacatggttacttctgagcctgatttagcaattgctttaggttcaattaacgaatctctacaattaaacgaatttatcgttaagcacgttgattctaaaggtactattacccgtaccaaagatcgtaaaacacgtgagcgtaacgcgtttcaaacaaccggactttctaaagctaaacgccgccaaatcgcgcgtaaagcagtaaaatcaaaacgtgctaatccatcggctcaaattcgtggattacgtaaacgtaagaaagcacttaaacgccgtcaggctctggggctaagttaatggaaaacctcaatgaacaacttttaattgagcattggggtcaaccgggcgatgtaattgatggtaaacccatgctggaatctattatcgttgaaggcgaaaatgaatctggcttaaaacctggtctgtatatcgaaggtgtttttatgcaggcagaagtagtaaaccgtaataaacgtctttatccaaaacgcattcttgagactgcggtaagccgttatattaaggaacaggttgctactcgtcaggctctaggagaattaaaccatccacctcgtgcaaatgttgacccgatgcaagccgcaatcattattgaagatatgtggtggaaaggcaacgatgtttatgggcgagcaagaatcatcgaaggagaccacggtccaggtgataaattagccgctaacattcgtgctggttggattcctggtgtatcaagtcgtggacttggttctttgaaagactcaggaaaaggatataacatcgtacaagaaggctttcgcctgactgttggtgtagacgcagtttggggtcctagtgctccggatgcatgggtacaaccgaaacaaatttcggaaaatacctcggcacaagttgccaatagtgctgatgatgcttttatggctctcgcagagaagttaaaagcgttataaataattatgtaacttaacacaggacatcaaaaatgcttaaagaacttttaatgaccgaagctaaaactatcgatgcttccgtcgctcttgacagtattttcgaatcagttcagctttctccggaagctaaagctaacttcagcactgtattcgaagcaacagtcaaaaaacacgccgtagctctggcagaatctcatattgaaaagattgctgagaaagcagaagaaaaagttgaagaagaaaaagaaaaagctaaagaagaagctcgcgaagagctgaaagaagctgcttctaaatactttgaccatatcgctgcagaatggatggcagaaaaccagctggcggttgaccgcggtattaaagctgacctgtttgaatccatgtttgtcggtatgaaagagctgtttgttgagcacaacgttgtaattcctgaagaatcagtagacgtagtcgctgaaatggaagaagaacttgctgagcaaaaagaagaaactgctcgtttatttgaagaagtttctaagcgtgatgcttatatcaattacgcccaacgcgagtatgctattcaagaagcaacccgtgaattgactgatactcaaaaagagaaagtagtttctctgacagagggtatggattattctgactcgttttcaactaagctgaaagctattgttgaaatggtgcagggttctgtagagcagtctgtaacggaatctgccgatataaatactatcgacaaagaagcagacggtttaaacttcacaactgaagcagtcgaagaaactcctgcgactaaaaccccatccgttatggatgcttatgtggcccaagcggctcgtctttcttaatttaaaaggttatacaacacatgaaaaagaataaacttatcgaaaaatggcagccgctgcttgagaacgaagctctgccggaaattgttggcgctagcaaaaaagctctgatcgctaagatttttgaaaaccaggaagctgatattaatcaggctcctgaataccgcgatgaaaaaatcgctgaagcatttggttctttcctgtctgaagcagaaattggcggtgaccacggttatgatgcacagaacatcgcagctggtcagacctctggtgctgtaacccagattggcccggcagttatgggtatggttcgtcgtgctatccctaacctgattgctttcgatatctgtggtgtacagccgatgtctaacccaaccggtcaggtattcgctctccgcgctgtttacggcaaagacccgctggctgctggtgctaaagaagctttccatccgatgtacgctccggatgcaatgttctctggtcagggtgcaaccgagaaatttgaagcagttaaagctggtgatgctctgactgttggtgatatcgttgttcacgatttcgcacagaccggtcgtgctcatctgcaggttgttgaagatttcactgtagacgctggtgctaccgatgctgctaaactggacgctgcagttactgccgctctggaagctggtaaagttgtagaaatcgccgaaggtatggctacttccgttgctgaactgcaagaagcctttaacggttcgaaagataacccgtggaatgaaatgggcttccgtatcgataaacaaaccatcgaagcgaaatctcgtcagctgaaagcacagtattcaatcgaactggctcaggacctccgtgctgttcacggtatggacgctgatgctgaactgagttcaatcctggctactgaaattatgctggaaatcaaccgtgaagttgttgactggattaactactccgctcaggttggtaaatctggtatgacccagactgttggttctaaagccggtgtattcgacttccaagacccgattgatatccgcggtgctcgttgggcaggtgaaagctttaaagctctgctgttccagattgacaaagaatccgctgaaatcgctcgtcagaccggtcgcggtgaaggtaacttcattatcgcttcccgtaacgtagttaacgtactggcagctgttgatactaacgtatctccggcagctcagggtctgggtcgtggttataataccgacaccactaaagcagtatttgctggtgttctgggtggtcgctaccgtgtatacatcgaccagtatgctcgtcaggattacttcaccatcggttataaaggtgctaacgaaatggatgctggtatctactatgctccgtatgttgcactgaccccgctgcgtggttccgatccgaagaacttccaaccggtcatggggttcaaaacccgttacggtatcggtattaacccgttcgccgattctgctgctcaacagccgaaaggtcgtattacctctggtatgccttctatcgtcaactctgttggtaagaatgcttacttccgtcgtgtatgggttaaaggtatctaataccaataagggagccttcgggctccctttagttgttttaatggatataaataaacttataaatccacagaggaaagcgcaatggctaaaatcaacgaacttctgcgcgagtcaactacaacgagtagcaacttaattggtcgccctaatctcgttgcattaacgcgcgcaactactaaattaatctataccgatcttgttgctacacagcgtactaaacagcctgtagcagcgctatatggtatcaaatatcttaaccctaatggtgacctgacgtttaatacaggtgcaacctatgcaggtcaaatcggtgccccggaacgtgagtcaattgaagaactcactatggcgaataaagattcttttaataaagatgacatgtttaagtaccagaacgtagtctttaaagtacttaaagatagcccgtttactggaacaacagaaaccgatgagtttggaattgtatctgaagcagtagcagctaataatattcgtatgttgtcagatgctgcagtcactgaaaaatttgaaggacccgattcagacccaatcaccgaagccagttttaaaattgataaatggcagacccaggttaaatcacgtaagcttaaaacagatttaacggtagaattagctcaagatttagaagctaacgggttcgatgctccagagcttattgatgatttacttgctactgaaatggcagaagacattaataaagacatcctgcaatcgttgattacggtttcttctcggtttaaagtaactggtgtatccgataaaggtgtattagatttaactaagcaggattctgccccggaacaaggtcgtactctgtatcgtttcatttgtgaaatgaattcagcagttcaacgtaatacttcttattctggtacttatgcagtagcatctactcgttgcgcggcagtactggcagcttcaggttggttaacacagaagaatgatggcactattccggacaacgcgtacggtatgctgaataacggcttacctctttattgtgatactaacagcccagttgattacgttattgttggtgttaaggcagaatttggtgggaaggaaactgtaggttctttattttatgcgccatataccgaaggcctggatttagacgaccctgagcatgttggtgcatttaaagttattgttgacccagctagcttgcaaccttctgttgctttactggtacgatatgcattgtcagttaacccgtatactgtaggattggacgaggacgaagctcgtgtgattaatgctgcggatatggataagatggcaggaagaagtaagatgtctgtactgctcggtgttaagttacctaagcttattgcggactaatttatggggagcttcggctcccctttttgttataaactaaatatgtcaaacctcggggagtattcatcctcgagggatttaaacacattcttatcatagagattaacacattctatcccatgcctgcgggctatatcaacagctactctcgtccctccagatacactcccacatcttttttcaggcgcccaatataataccttatctacaggctcagtgcattctaggcccaatacctgcatagaattccgtgcgaataaagtctgcactatcttcgagcattcatcccagtacgacgtaacttctctcgccttaatgatgcttttgattttggcctcgtttgataattcagaccatacaacaacgcctgtatcaggaaagtgaccacaaaagccagagtaaggaataatcctacaagaatttgacctatcgtatttcgccaaccacgcttcatctgaacccggagctccacctgaatatgaaaaatgcccctcttcagagaggcgttgaccgattatagtcattagacttagaactctgcgtggcgcttctcttgaaccaatcagcgccagcctcattattctaaaacctcatgccatttgctacgaatagtgttttgaattaaagtagtcagttctttcttaacaacagaaggattatcagcgaatagcatgtcatgaccttcacgtgctgcttcattaatgatatctttcatagtcagacccataacacgaccgaaatctttagcagttacagtaccaatatgagacagaacgttacttacacggttccaggttacatattcagaaaagatttccagaacacgcttatcattctcggtgagttcaaccttcgctttaataggcttatcggatttagccttctcactgaacttagagttcttacacttaatagcaacacgagtaccattattgaagaacttaggatgaaccggcttaagaacatagccttcagctacgccagtttcagaagaagcctgcggaccgaacacatgtttatttgcatgttcaaggtcagtcgtgtcaacaagctcattatagtaattgacaatagatttaaagtcattcacatactgagatagctcggcaaatgaacctcgaccaagaagtggagctaatttaagaccaagaccagtagcaaacgattctactacataatcgtcccaataaactttttcgttaccggaatccgacaggatatcaaatacgtagaaatctttctcaccatagtctacgcctttctgaataccgccaccggcaaattcgccgaagatttgaacagatactaaatccatggcgttcagcatgttctgcatcttaacgaaagaatccttatatttcttcatgataatatcatgaccaaagaaactttcgctttctaaaataggtccagtacgcttagccggaacgatttcggtaggagtaataatcacactgaagttagtgccatgaatcttctcacgagctacccactcaacagtatgcatatcaaaaccagcaccacgaatcttctcgatgaacttaccgttgtaatgattctcaagactagaatattttgcaaacattataatttccttagaatgtgattttcataaagtcagtatcaccgttacgctgggaactggtataatttgtaacaaatccttcatcatgcaaataattaagaacacttgtaatgtgtttcttaactagactacttggatacataattagctcacgcttacccgctaaagcggttttctcaatctgagttaatacttcttcttttgcttctgataattcttctgtggctacgttaatagcagtattagccattctatcggcaaggttcataatttttctctcaataaataaaataaaaccaggagtccatctattttggacaagggtaatggtatcagaggatttcccctgagcccattataccacatcgatttttaaagcaattaatatccgcttggaacaaagcgatacattaatttgtcatgtttatttcgcatgatttcaaactggtttttaggtccaacttctaatactaacggaacatttacatccattagcatccaatcaatttttccataccgttctttaatcaaatccgatattttgcgtgcgccatttttataataagtgttatcgaatattcgagtcatcatattatcaacaaatcttgatgcagaacgccaataattaatattgctcgctgcaggagcaaacttgcgctctaggaacatctcaagtttctcttctacccttttatctactttagacattataaagtcctcatgtgtttaacaagtttcttatgacgagattttatatcaacgtttgttaagcgttttcgatatacaactttctctttttgtttaaaccgctcatgtgctttctcgactgagacccacaatttagcagcttctgctggagtgatatctaatgctctcgcaatttcttgaaaatcttttccgctttcatgcatcaagtgagcttgtaatgctttcataataacctcatctatgtgacgaggacataataaaccaatccgtgaatagcaaaaagggagcccgaaggctcccgaatattacggatagataatacctgcttccagcgcagtacgatgaacaatgtatccatttctagattcttgtacatcgacctctggataatcatctagcattttagctagagtataccgatgcaggtaataatcgctgtcagggtcgtcgagtttccaatctttgccctcaacagtcattcgctggatttcatccattacccaccatccacaccagatataggctgttccacggaacggtagaggatgaatatacggaagttctccgtctggctcaggggctactcttttggtaatagttacattaccggttgtagtcactgtgatcggattgtaattttctgcagaaacctcaacagaaacctcaatcacttgagaccctatatcagacgtgtcaatcactaacgtgcttgttgagccttctacaggtgaaccgtctttggtccaagaataaaccccagttgcaccttctggagcaccgataacgttggctttaaaagatgcttcagacccttgttcggtcgtaatagactcaggagtcaaagtaacagaaacaccgctcatggtctttttagtaaaagcgacagcaatacctttagttgcagttccattattatagtctggggcagaaaccgttacttcacaattcagtgtgtagctagtttccgttgactcggttaaggtaattgttttacccgtttggccagaaataacagaagagccacgtttccaaacataagcaatgcttgctcctgacggggcgccagtaacatcagctgtgactacttgggattgaccaatttctttagaaacagaagttgggctcaaagttaaagtaatcgcaggcatagttttgttattaacggtcagagtagtttctgcttcagccgtttcaggatcgccttcagccggagtaacagtagcaactactttaacggtcttactacctgcaggtcctgcagcaacataattcatagctgcggtaacagaagactgtggtgctccatttacagtccatacaaacgtttctgtgccttcagctgtggctccagaagttgttgcagtaaaattggttgttgctccaatgactgccgaagcagccaaaggagcaatagatacgctataagccataggtgttccttattttaaagttacaaatgaagaattacgtgtttcacgaatcataacagacccgtttcttttgatgtaatagattaaactaaacagtgtctggtgtgctgatgggtgttcaaacgacgttggccgagatttccagtccgggttatctttaatccattggtaaatccaccatggaagagtaatatatcctgggttcttacctagcaactgcatgtttggactaaagtttttaggaagctcaatggtttcatcagttttaacaattttaactactttgtccattgctttggagaattcttcagggtccgtagtactaattggaatgtttgtaagttttccttcatcatcgatatggataatgctatctccaataggagcttcagcataaaatcctttatcattgatagaaggagtttttacttcaaatccagggtcatttactttaggtgtttctttataaaaatctgggtcaatatcatgaattttaacacttgcacttactggagcatcaaacagtagttttgcttcatcagacgcttcatcattgaaaagtgcttttccttcaatttcatcatctgcttggattaaatcagcaattgatagaccatcgttgtcttctggcataggctcatcggccaatttagccagttctttttccaaatcagcaaccatattgtcaaatgagcgggtcttcttcagtttaataccgaaggttttggcatattcgtcgagcttgtctttagcttcttttttatcgagtgcctgaatttctttaatatagtctttatctagcattgggtgtgcctcatgtaatgtataaatatgattgtatttataaactgaggatagtacagtgcacgacatccaagtcaaatttaaagattttagtcatgttcatattgagtgtgatgactcaattttctatgaactcagagactattttagcttcgaagccgatggatacagattcaacccgaaatatcgttatgggcattgggatggacgaattcgtctgctagattataatcgtctcttaccgtttggtcttgttggccaaattagaaaattcgctgaccaattcggatataaagtttatttcgatccaactatattcgagcaagaaactctttcacgggaggattttgacacgtggttagcatctaaagaaatctattcaggattaactaagattgaaccccattggtatcagaaagatgctgtatatgaaggactagttaataggcgtagaattcttaatcttccaacgtctgccggtaagtctcttattcaggcattacttgctcgttattatgtagaaaattacgaaggcaaaattcttatcatcgttcctactacagcgttagttgaccagatgattgatgatttttgtgattatcgtttatttcctcgcaatgctatgttgggtattcgaggtggtactgctcgtgattcgaatgcattagtttatgtatctacctggcagaccgctgttaagcagcctaaagaatggttttctcaattcggcatgatgatgaatgatgaatgccatcttgcaacgggtaagtcaatttcaacaatcattgcgggtctcaccaattgcatgtttaagtacggactgtctggttctcttaaagacggcaaagctaatatcatgcaatatgttggcatgtttggtgaaatcttccgtccggtatcaacttctaagttaatggaagacggacaagtaactgagcttaaaattaatacaatcttcttaagatatccagatgcagccgcaaatgctttaaaaggaaaaacgtatcaagaagaaattaaattcatcaccaatgttaagaaaagaaaccgttgggttgctaatctagctgctaagctagcatcgcgtgatgaaaacgcttttgtgatgtttaaacatgtagctcatggtaaagagctatttgagatgattaaagctactggtcatgagcaagtttattacgtatcaggtgaagttaatactgaaacacgtaatgctttaaaggctatggcagaaaacggaaagggaattattatcgtcgcaagttacggtgtattctctacaggtatttctgtaaaaaacctgcatcatgtaattttagctcatcccgttaaatcgaagattatcgttctccaaacaattggtcgtgttcttcgtaaacacaaagataaatctttagctactgtctgggatatcatcgacgacctcggtgtaaagccgaaatccgccaatgctaaaaagaaatacacgcatttgaactattgcttaaaacatgcattagagcgtattcaacgatatgctgatgaaaaatttaactacgtaatgaaaacggtaaatctatgattaaatttgaagatatttatgaagccacaattcgtgaggctactatcgataacttcatgagtaaaattaatgcttgccagaccttagatggtctggaagaactcgagaagtattacgataagcgctctaaagaaactactcttgctgattctgatgacatcattgtgcgtgatgctttggcggggcgtagacaggctcttgaagccgattctgaagatgaagatgacgaagacttctaatacaaaaaagccccaaccgaaaggaaggggcaaagccaattggctacatcaacactagactaaattaaaagctgcgtttcttgtaattgctcttctgtgtcttcagtgacaggcaattcaatcgcataattatagcaagctccgggatgaaccgggcctttgtctgtgtggacaaccaatgcttcatcgattggtcctttacagacgacacataccgtattcgacatgattgtctccttagtttacaggtttatttattacgcgccagcttcaaactgacgaaggtcaataatgtgcttaatgctaaaacctcgtgacttgatagcatccattgcatcactacagaactccaaaagaattccccaatattgcaatttagtatctacacccaagatttctttatcagcgcttaaaacagttttcatttctgatttttcgtatacatccatgcatacttcaccaccaacctcgccacggccagtgtaataatccaatcgtgctttaagattttgctttttgagggcatctaatcttaacatctcttttcgacaagtcgagtgcttacgcacccatttaccatacagaacggggttattagccgcttcatactgtagtttagtctggtcgataatcaaatcattatccaattcatcctgtaattcttctaatctcattctatctccactctactgtttctttggaaggactagtcccattatactctactgctagagttagcattactacgcatctgtatacgtatacgttctagcgtatcagggtcgtctactatagaaaactgcacggtgacaattatagcgttatcgtcatataacggaagcacatcaaccgatagacgattaatcctaggctcataattacgcacggcagagactatattacgctttatcgtatcaccagttaacggagtcatgttttcaaataattcgtttgtgatatcacaaccaaactctgggtcaaatggccgagacccctttcttgtggttattattccaagaaggctatttttaactgatcgagctcctactgtttttgacacatcagtatcccaagcaagtcgcatctctgggtcaaggtcggaatatagtttatcgatattgctcatgacataatcttaaagaattctttaagccccttaattacatgaatgtgagaaattccgcattcacaagtaatgggaactgccaattgaacctgtggcttcaatagcatatttttgatgttaactacatcttcggttgtaatagcagaatataaatcatcgatttctgcatcgtttaaatcattaaagtaaatctgctcatttccaaccacgatataatctatgcattttgatatcatcattggaatgtcggaatcgtcaaaaagattaggatacttaaactttatcttgaatccctttaagtcataccagaggtcttctggaggatcgatttgcgcatgtgtataatttaatggcacaggaattttacgcccacaggtgcaattccaggtcacctcatgattaacctcgcctatactgtgcgcccaaagtataactataagtaattccgattcttgtttgtttaacccagtagcattagtacattctctgagcaatgctttaacgcattcatcgattgtaccgtttttcttcgctgcaattaaattagcgtattcttctagtgtaaaagctcggcactggatattcttgccatttattcttgtttcaaatttatatgtgatgttcatatccactcctcttattcaaatatttataaatagtataaagaggattaccttatggccaatatagttagatgcgaattaccagatggtgtccaacgttttaagccatttacagtagaagattatagagaccttttattggttagaaacgacatgaacaccaagtctgaagaagaccaaaaacagcttatagcagaattaatggatgattattttcatgaccatcctgtcgagtatcgtccttatatatttcttaaagtatttttgtcaagtattggtaaaactaaaataccagtcagaatgaagtgcccaaaatgcggaaaatacaagcagtatctttttaatcttaatcaacctccgttgacaaatccgaaagtagaggttgcaggattaacgcttaagttcaaaaaacctatagaaataattgatgatacaggtaaaatgattttagacaacattatatctgtgaaggattcatctggggaataccagtggaatgaattaagcgatagtaataaattgacagttatcgatgctatagatgttgaaaccttggaaaagattttatcgcagatgaagccgtttaactttgagctaaaaacatcatgctgtgataccacgacagtattaaaatatgataacattgttgatatctttaagctattgctacatcctgacgagattttcacattttaccaaattaaccatagattggtttctcaaggtaaatatgacttgaactctataatgaagatgctgcctattgagcgtggcataaccttatcgcttattgaaaaggaccttaaatcatgacaacacaaagattaggatatcctaatataagcataaaattatattctggatatgatgcatggctagctaatagatttgttgaattagctgctacatttattacattaacaatgagagattcattacgcgggactaatgaaggtctacttcagttttatgattcgaaaaatatgcacacgcgtatgaatggcgatgaactagttcaaatatctgttgcaaacagtaacacatcgagaacacaaacccgaatttatgggattaaacactttacagttggtgttgatgataaaggtgatagcattattactcttcagcttggaacgctgcatgacataatgaatctcaagttcagcagagcgttttttagttctgcatatgaaactataaaagaaatgataggtgcaatgtatgttgaccaaccattaattgctccaccgattaacggaattaacgcttacgtcccacgggttccctggactagtaccctcaaagattacttacgatatgttagaaatgtaggcatttctacagacaacgatcaatttatttttgcgtgggaagatatcaccggaattaacatgatggattatgaatcaatgatatcccaggatccaaatgtattcatgttcggggctcctcaaacaataggtcagtttgctgcgggattaaaatatccattagcatgggattttgaatggcttgttaaatcaaatagatataatagaaatcccatgaaaaacgcaacattttatgcacactcgtttgttgacaaagatgttacccgaattattaatggagaaggccaaaacagcgtattcattaatagatcaggcggatattctgacatgatttttaggaatggctatgaagaagcactacgcatttctacgatggctcaatatgacgggtatgctcaaactaaatgttacggtaattttgaactaactccaggaatgaaaatcaactttgttgatttaaaggaccagttcagaactgacttttatatagatgaagttatccatgaaatatcaaataacacatctataactaacttatatatgttcacaaacggctctgcccttgaacctgtagatttgattaaggtgaaaaatgaacttaaacgtgattcttcctattaagaaaatagtaataaatgaaaagacgatatcaattccaaaactggggttaaagcaccataatctgatgaaagatgttaagggtccagatgaaaacatgaatcttcttttggattcaatttgtccaggattaacagcagccgaatctgatattgttgtattacatttattagcatttaacaacagaataaaagaaactgttgttaaagatgattttacctacgatttgaataaggtttacatttgccagcgattaactcaaaggttagatggtaaagaattcaaattcagagctcctcctcgttattccaaactaggttcagtagattcaattttgagcgaatttcttgaatcagtagatggaaaaccaatggatataaactttatgaagcttccagcttttgtaacaaagtgggctgatgacttagtaaacactatagccattgatggacctgaaggaccaatcaaaggcatgcttaacgtaatggaaatatttgaatgactaagaaatcagaaatgaattcaatgcgtagaagagttattgctgactcggctccacagaaaaaggctgagtctcaagctgatgctcagattaatacgctagaagatattggtcgtcgcttagacgaccagcaagcgtctactgatttgatttcggatgtaatagaaactaaatcaaacgaaattatcaaatcagtagaagatgtttcagctggtgttgaattaactgccgaagcttcagaacgcacaacagatgctgtctcgaaattaaatgatactgcatcgttaattaatgataagctcacgaaacttgccgacttgttatctaaaaagcatgatgttcaacaagatgtccaaaaaactggtactggaacatcattagaaacgataacagaacaagtcccggatgctcctactcagcagccattggaggaattacttgaaaggcttattcctcctcaggatgatagaagacctgatgcagatttctttcctagcacagaagagcaagaggaaaaagctgagcctaaaaaggaaactgaggacaagaataaaaagtttcttgacctgaaatttggagaattaattaaaagcgttaaatctggttttggaaaaactatttcattaacagataaaattagcagtatgctgtttagttatactgttagcgctttggcccaaatggcgaaaactgccgccatggttttgggcgtgataatgcttatagatttaattaaagttcattttaattattggactaaactgttcgaaaagaactttgttgaatttaacaagcaagccaaagaatggggtccgctattaactgcaataagcgagatgtcgaatgaaatagtaaaatcgttcgtcaaaggagattggggtggattagcaaaagccattggctcgggtttggttgatgtaattgataagctcggagaaaccattatgctcggaatgagtaagcttcttgctggaatgttacgcgcattaggatttaacgattcggcagataacattgaaggcgctgctttagacagatttcaaactgttactggagcagaactcgatgaagaagatgctaaaatgagagcaaaatatgttgaccgtcaagaaagagaatatgacgaacaacctgaatggaaaagaaagctttctgctaagttccaaaaattcaccggtcagattgatgacgatgaatataacaaactgctgagcggagagaaaaagcaatcagcgtatgcagacttgccagaagacgaacgcctcaaaatcatcacagctcgtaataatgctgaagcagaaatgaagagaacaaaagcgtatgtagaaaaaactgacgcatctgattccactcgattagactctgctaaggatgcagtacaaagcacaaccaccagatataaagaattagagaaattatctccagaagttgcaaaagatttaaaggttgaattagaccaattgcaaaagcttcttgattctaaaatatcagaacctgctccaactgccgaagctatacctgcagcagaacaacctgaggttaaacagtctgcttctattaaagccgccgcggatagtcgtgaagctgctcgtacacgtgaatctaatacacagtcgcaacctattcaggttaataccgctgtaaataagaatagcacatacgtttatagaacgcctccacagacttcaacagctgctcctggaatgcaaggcgctatgaaaacctcttaaggaaaaacaatgatttttgaagaactggccgatggccttgaaaacatcaaaaaatcaggaactcgaatttcccaaggtaaatctaaactgacgaatgcgcctaccactaaggtggcgcagtttccggccgaacgctcagccggaaacgattccgcacaagatatgagagtacatgacttgtatcgtaacggattattattcacagcatatgattttaaaggaagaactactcctgatttgcgttcatttagacgagatgtaatgttatcgtctgtattcgattcaccaatgtcagcactggctaattcatcaagttctactacaagtactgcgccggtagctaatattctattaccacggtctaagtcagacgttgattcggttagccataaatttaatgatgttggcgattctcttgttactcgcggcagcggtactgctactggtgtattaagcaacgtggcttctactgcggtgtttgggtcgatagaatctttaacgcagggattaatggccgataacggtgagcaaatttataacactgcccgtagtatgtatgccggacctgacaatagaacgaaagtgtttacttgggatttaactcctaggtctgcagatgacctcatacaaattattcgcatctatgaaatttttaattattattcttacggtgtgacgggaaattcatcatacgcaaaagaagttaaagctgctattgatgaatggtataaaggaactcttaaatccgcagctccagatggggctaaagtagaaaacactgtgtttgagcaaataacatcgtttttaagcaatgttattgtagtttctaacccaactatttggactgttcgtaattttggatattctacatcaatggatggtagagaggatatatttggtccatgccaaattcagagcatccgctttgataaaacaccgaacggtcattttaatgggttagcaatcgctcctaatcttccaagcacatttacgcttgaaattactatgcgtgaaatacttactcttaatagagggaacgtttatatcggaggtattgaataatgtttactctcgaagaatttaagagtcaagcggctgacatcgatttccagagaactaatatgttctctgttgtattcgctactgtaccctctagtaaaacccaggctcttctaaacgactttggcggagagctgtataataatatgggtttagatggaaattggcttggattgacaccaggtgaattcaatcagggtataacaaccatagtaacacaaggaactcgacaggttgttcgcaaatcaggtgtgaatacatttatgattggcgcaatgacacagcgtgttgtacagtcgttgttaggtgaattcacagtaggtacttatctgcttgatttctttaacatggcatttccgacagcaggcttgatggtgtattctgctaaaataccagagaatagactgtcatatgaaatggataagttccataacgctcctaacataaaaatcactggaagagatatggagccgttggttctttcatttaggatggacccagaagcaagcaactatagagcaatgcaagattgggtaaatgcagttgaagacccggtgactggtctgcgaggattgccacaagacgtagaatgtgatatccaagttaaccttcatgctagaaatggattaccacatactgtatgcctgttctcaggggctatgcctgtagcatgtggagctcccgaatttacttacgatggagaaaacacaatagctgtgtttgatgtcacgtttgcttaccgtagcatgcaaacaggttcagttggaaaacaagccgcaatggattggttagaagataaaactattcagaaaattgagacgattaatccaaatcagggcttgagtgcgtctgcttcaagattgtctcgtttaggcggggcaggtggtggaatttctaatatcactacttcaacaagcagaataatttaggggccttacggcccctttgttttatgcaatgcagccaataaaccctggctcagtacgaagaagtttcatttcttcagtagtccaaactactttaacaggaataataccttctgctttaccgttaagaaccgcttcaacaaacgatggttcagttggcttacggaagatatcttgaataagaaccgtcggagtaccttcgttaaacccttcaagcatgataagaacttcttcattgaacttctctgcatctttaacatcagcagaccattcaataccgttaaagcggaatacgtgtttcatatcaatttcctcattggtttgtgtaagtctatagtatcacatccttgtgataagtaaacaactttatgcaagtttttctgggataccatccaggttgatagcaccagccagtagctccatggtacgtgtgtagctaaccttatctgtggaacggtctggcgaaaagtaaatctcatttaaaaagcctttgaacttgctttcttcaagaggttccactttgccctgttccatcaagatgtcaccatcatagagatgaaccgattcatcgatttgctctggcggaactaccgtcatttctaccatgaatgtcttgttattcgctacaccaactccatttctaaaaggagttccccatactttgttgactttcattgccaacccgcgaggaagaataacttcagcctcatcgctaaagcttgacaagacacccgggataactaccttaactttatcagccccatgaataacgaacccaaacttaaactcatcaccataggcaacttcctcgcctctatcaactctttccaagttgtctgttccaataacagaagatactgcatcgatagttgtttctttgttttctaaatcagaactaggtgcgtctggcattaatgaatcaccagcatttgaataagcaccaaagataattggacttaacgaagtagaaacatagttctggaaataaaacattttagactcaatgttatctttaaagtcttcatattttcctcgctgaccacgatacaaaagagtgcctggttcaagacgcaaacctttttcaaaggcagaatcgagcggacgaattttcttgtcaataatcggatcgcctaagctttccatgccaataagatagttattaacaaatgaatagccagaaccacagtaatgatgtattgcatctttttcttcttcgcttaaacgagattgcatttcacggttatattcaattgctttggatatagaatcgccaacgattgacacataagcggatatcatataattgacaagattttggtattgacgtaaagctccgaaatcgtcagccggaggcatatcaaatccacgagtagctacttcaacgattttacgcaacgtttccatagatgcaggatttttagcctgttcaataacatcagcaacgtctgaaattcgttgctcaacgattttcattttgtctgaccccgaaggaatgaaaaccttccagtcgtcatgcattctcgacatttggcctacaaataatctctcaactgcatcgccaaaattacttccatatccgccacgaacacgatagtgcttgatatcatcaacataaaaaggaattgatttttctaatccggctttgatatctttttggaggtctaccgtatcgccttctgcgtttagtactggagtgttagtagttaattcataccagcgttcacgtttattttctggccaatcttcatcaacatatgaaacaaatttgccgtactgtgctcggattaaatcttttcgagacactttcattttactcattacagcgagttcagatttcttgtcttctttttcgccaatggaattagccaatgcttcggctttggtaacgttttcgccggtttctttagacacataaatttcacctactttggattcaacctttgtgtataactcatctgaaatttcaggaattccttcaatctcttcaagtttcttgcccttgcgaaccataatggaataagcatacttacctttatagtaagccatgtctttcattagattgaaccgaccaccggtgcgagtagtaatcaaccgagcaagaatgcgttgaatagctttatcctgtccttgcattttctttggattaaagcggaacattactgcatcggctttaatttgtttaactactttgttgacagtttcaaaaatggtattgatagcaccaatagggtcttgtcctaacccacccttgagggctccaatattacctttttctgacacagagaaaacatatacctgaatgaatttatcacccattttgatattcttaactgcatcaccttgacctgacccgtgtactaagcgaatcattaaattgttattacccggcaccttaatcaaaaagacctgtggcacctttagttttggtttaacgttctcgacaggatagattttactattctcttcatcgaaaacttcatttaaaagttccatgacatatcctcgttagtttattctatttatacgaaaaaaggcccgaaggccttaattaattattgttactgtgcgccaaacctgtaatccatttacagactcatactcttcaatgttttctttgaagtttttgaatacatcgatattatcaaaatcaagaacttcggtatggacggaaatacctcctcgcccatcatcagttttagcaatcacttcgtatagaactttcattttattcctgttgcctctgtaaagttcacgccaaatgcggcttcaaatgtattagcaacttctttatcatatctacgctgtttaatgataggtaagaataatcctactgtaccatcatcacggccttcagcagttacccaaccattgcattcaagttcccagatagttcctggaagagaatctctaattttccatagatgagtacggtcaagctcgtgcagttcttcgggcttatctttaagacctgacccagcgttaacacgaatacgaccacattctgatacgaacattaagccgcccattttaccaggttgtttcctatgctcgtacgaaccaacacacttcaaatctacggtgataacctctttaaatttgacgaggttcttagaacgcttatcttcccaataagcaccgatattcttaaggataataccttcgagacctttgtctacgtatgtcttatagatagctcgagcttcatggatgttgtgtacgacatggttttcaattagaataaccttgtcatagcctttgctcatcatttccaatgcacggaatcgtacatcataagcaaatccaggaactttaccttcagaatatactacgtcaagtggaacgtaatcccagacttggaatcgcataccatcagcttcttcagcagagatagttcctttaatagccttattggccaagccgtttgattctgtacgagccgtctgttggaattccttagccttacttagctcaggaagctcaggctctttaaacatatcaaacaggtcgttttcttcttctttcacttcgacatgatataccaactcgccgtcaatcatcacaccattaggatggcgttctcgggcttctttggtcatctcgataagttgacgcttaagtttatctagacccaggtattcattaccggaacgagtaagaagagttacatcatctaattcatctccgcggatttcagcgaagcatcgagctccatcggctttaagctgagcaaatgcagggaacttaatatacgatagcgctttctcagagtaggctgatgctaacatctgtggcatctcaggaattaatttcttccataccttattagcaatagaacctgaagcgccgcaacgcatatccttaagaagtacacggaccagtacactagcatcaccctcgttcatcttagagagcaaatctactagcccctggattgccatattaccagtaagtactcgtgctgccagaatgtcttggaggtaatctagaccatcagaaaacgtctttgaaggaacatttggatatttaacgggagtatattctggaactttcttaataaagaacttaaatcgccctgaatacgccagcagataagctcgttttaaatcaacgttatctttattgtcaacgagaatttgggttttggctttagaacccttagcatcttcaattgctttgatgatatcaaaaatcattattcacctaattcttttgaaagttcgcttacactacgatgataagttaatccatcaatataaacaaacccgttattgatgcattcattccaaatcgggcacgactttgcttcacgccaaattggattccaacgataaaactgattaacatgaccataatcacatgataaccagcgtttacccaccttagtatgaactacaaacatatttcctcctagggtatggctattataccatacccagattgttagcaattaatttggtggttatcacatgtaatacgaccgttattccaccagtcgtttccaggaggaacatgtggaccaggactaaacggaatgataggttgtttccaccaatctcctggaacttgtcgtggaggccaattaaaaggatgttgctctttactaatttggtctttgatagcttcttcccacaatccagaaagagacttctgtggtttcttaacggatttcagagattccaggcaagttacaatttgatgccaatcttcaaccataattccaggagcagtcactgaaccttctcgctcaccacgaggcatatagaacacacgagtttcagtgtcttcaaagactttgctagccgcagcaatatgtttgggcaaatcgtcaacatagcatacaatgcgatcgccgtattttgctttagccttttccagtaaagcatctttagattcatcataatcgcagaccatgatttctgtaaatgcatcagggaacaaagcattcagattgaaacgacgattaaggttagcatctactgagttgccaagagccgtgatagcgacaaaatcgtatttttctttgagcttattaactgtagctaaagcatcagcatacggagcaagataacgaataaaatcgctgttgttatacttcagaagcagcttaacagccagttcttcttcacaatcaaacagctcagcgggtttaataaatttttcagtagtcatcatatcaaggatatgctctaccggaaggttatatttttgggcaaagtaaggcagaccactttgccatttaacgatgattccatcaacatcagtcgcaattacaggttttgacattcggggaaattcctcaatgcttgtttaaatttggcgacgctatttgcggcaccggtgaaattgaaccagattaaccctggagtgtccgagggttctatatcaattaattctatattataatactcagcagtctttagcatttccctggtgatacgtcgggcaaccatatgaccgaaatgaggattaatagacatcgtcgttagcagcccttagttgagtaatcggataaagctcagattccgcatgaattgaacgattgccatcaacccagttgacttcataccaaggctcaaccgagtaggctttaatggctggagccgtgtcacatacaactccaggaattccatttgctaatcttactgtactgaagatatgatatttcatgcatcaagtctcactgcccattcgggcaattcaaagaaatccggagcatcaatttcatactcaactgtatgttgtttaacatcagctgacatgatatcaaccattgggtggtttttcaaactgcaagaaaaaataccagctttagatttaggcacggatacaatcatgatgatttcctcaaaatttagttatgaatttttctttcggcattttggcatttgagccatcactgtcagaatacccaattggcatagttgcattaatgaattcaattttagcatttataacactaatgctcagagaatctacgccatcaaccatacgaaattcaggagggcaatacttatcaatgtatgctttcacgccatttttattagcaggtgtaccatcgcgagtatcgctgataatggtttcaacttttttctttcgtgaatcatagaaagctgatacaatcatttcaatttcctcttaaaacggacgaatattaacgtgaaccacagggacagcaaaaggttgcatgattacaacttttgtgtctttagttgcattcaggcgttgtacttttgcaagattaacagcttcttcctttgttaatccgccattgtaggtatcatttcctttatttgatgtccaaacaccccaatcattgcttccatcatcgtcggtcttcggttcaggttctttgtcggtggtttcttcaaaataatgttgaaattcttgattagtaagaatacaccacatgtgagaaaagcggggttcatctactataactcgttcgcgctctccaccgggcttaatgatttcaaattcaattaatccaatgttttccgcatatctaaaggttctggtaattttaatcggattattaccgatttgctcaaaaacacccttgataagagcgcctggagacaagattggagtctttttaagcttatagaatttacctttttccattatcatttcctcaatagtgggggccgaagccccgagttagttaaaacttgatttcgtttgaaacgatatcccagattgcttcacgctgttcttcggttgttttacgaccgaggatgtggcgcagataaattttaacaagcagctgacgatttgtgttccaagacggatgtgaagataaatcacgtttacgaacttcatcatggaatccaactttgatttcagaaccgttgaactgaatatccagagtaggaccattttcaaagctgaagaatacgtagttatcttcccagtacatatcaatttgagctactgtaccattgttgtgttcccaaagcaaagtagtagatacgtcccaagcattgttctgtacatatttgcggttgaagttagtgaagttcatttttattctccgtagtttgtttatctgtttgggtggtacaggtctatagtaacccagaccacccaagaagtaaacaacttttattcaaaaacttcagacatttttcacctctacagttttaacagtttttacttctgcaaatccgatgcttttaaacagttcatacttggtagtttctggaacgatatcggttagctcaaggatgatttcttttgcttcttttaaagtgaagacgctacgcccatctttaaccactggagtaggtttaacgaacgttgatgggatttcaaaaactgcataacgatcatcagagctttggttttcaaacgctcctatttgcacaacctttccttcttctaactcgtggcgagaaaataggcatgaaagtgaacggtcattttcatctcctaccgttttggccgaaataattttgccagtttctgttttaatcttaaccactcgtccgagtaaatctatttctaatggcgcccaggtttgaatcccaatagcggcagcaatcaaaccgttaatgctattctttgcactcagccatttgtggtaagtttccggagaaatacagtatgctttgttttcgctgtaatacattttgatatcctcaaagttggggccgaagcccccatcagattattgtttagaccaattatccatgtttaatttaccgacctttttcatttgctcaattaaagcatcggcacgattacgaccattttcataccaagttacatcttccgagtaaccagtttcttcatcttcataagtttcagaacgaatacgaccaacaaccggagtgttaagaacatatactgaacctgtgaaccagtttgttaaagtgatatgccagcagaaatcatctgatggaccgtccggtgtcatgcatggaacgatatcaccttgaactttagacaaaatccacattttctcgtggacagtctgagctttataaccgtcatggtctttagtcttgatagttgcgttcaggttgatggtattcattttattctccgttgtccgtttgggtggtacaggtctatagtaaccttgttgagcctagaagtaaacaacttttttcattctgtggaaaataaaaaagggactcccgaaggagtccctgaacttatgctttcggcttaccaaaacgagaagcatcatcgcgaagaaccgcacgagctcgacgcatgattttctcaaccgtctgattgatacgcttgttcgacccacgcttgtagccagcgcgtttagaggtaccaacaacttcttttactgcagtttttgctttagcttgtttagccattttatcatcttccattttggagaaatacatgggagcacgttcttccgaggttcaacttctttcgacagttctttcggttgtagctcccgcaagcccctaagggtacgtttaaactcttatctgttgcacaccgttagcttaaaggttccgggtccgatttctcggggataagatatacaccgatggatgtataggccttgaggcgtactcccgattggccatcgcctcggggtagcatgcacttgccgtttattttctagctgcactttggtagcaaatcaccgatggtttcggatgttttacgtggggataaccaacaacgtccacatcatacgttacccatgcgtacacatggtgggcgtacaaattacttcagcgttaccacaaagtggcgaacagctttgcgagcagcagaaccaagatgcttagcatacttcagttcatccatcgcttctaaagtatcacgaaattcagcttgagctgggttcagatgtttaaaacctttcagaacttccagagcttctgcgtagatatcaatagaagcaccgtaattttcgtgaccggaattccatgcattacgttggagttccagggctttagtaagttgtttgttcattgaaacattcctcaaatgaggttaaaatttggtggacggtaaccgaggtttagctcgggcatccaccgcgtagaattgctcgggtaactaattgtccgacgcccaattcatattattatttatacacacaagctagggacttataatgacaagtcacaaacttctgccggatttctttaggtttcttcacacctgccgctaccaatggatgcggtacatttctaatattaccaacaggcagtggagtcaaatcaccgacttcaacaaaacctttcggtacatcatcaccgatagaatagatttcacacatatccggcagttgtccttgttcttcttttccaagaataataccggaaggagaaacaatttcatcacctttttgtgcaggttcagatacgagaattacatactcgcctagagctttaattggaagttccatgtgttacctttattgtttaaccatgtagttatattaacatggccagtttaaagcaaattacttaccgatcatctgcagcagatgctcaactttcataccatttaccgagatcagtttatcaaaggtaaatgagcgccaaccttctttctcggtatcatataccggaagtgaagtagtgctttctgttcgtgcagatttagtagtactttctaccaaatcagatggaataatatctttatcacgagtacagcgcagagtacgaatagtaccatccgctttttcaaacacaatctgggattcacccatgctcagcacagctttaagtgtttcacggatatggatgttttgttcagtagtcagtttcattttgatgtctctttaatagttttgataattacagatttgcgcttggataattcttttaataatcgaactgcttgatcttcaaatttaaatgttgctaatggtttccatttaaaccaacaccggcgttctactgagtatgatataacaacatcaccacttaggttaagtttattaatttcaacaattctaagtttcattattcaattccacagaattctttaatgttataccagttcaacttatccaaattacgttttggaacattgaacacctcaattccagccgaacgaagaatatcgtcccaaccgggttcgttcttgtcgtatgtttcacagtatactaattttttaataccagactgagcgatggcttttgcgcaatctggacatggagacagtgtgacatacattgttgctccatcaatactactgccgttccgggcagcaaaaagaatagcattaagctcagcatggatttcattgactttagaccatgcagagtgggctgctcgatgttctttgagcaatccgacctttttgacttggaatccgtcttgacgcaatcccgtagatttgtaaggaatttcaccaatccaaccttgttctgccgcatggtcacaacagttcacaccaccagaaggtgaaccgttatagccagtagaaataattcgtccattcttttcaattactgcgccgactttccacgagcagcattttgactcttgagatacgagatacgcaatttgtagtactgtcgacgctttcatttaaatcaccagataagttgtgttatttgttttaaccaattttaactcgtcggtaggagaagcaaaactctctactcgagaagtacgaatacctgtgccatctggaaacggatggtttcctcgttcaagaacatcggaaaagacatagccataaagaggttggccttccttaacaacaacgttactgtacaaaatagcatcatattcttcgcgtggaattgaccaaacaccttggtcagaaccaataacagcattaattagacgaataccattttggctaatttctgctttaatgccacgagcatgttcaattaaaagagcttctacagcctcacgtaaagtcatcagatatgtcctaaaatgttagtcatttcaacttggcctgttccggttaaagccaattgagtgtgttgattgctctttccattattaactgtaatgatataagcatcaacatagttaaaggatgactctcgtcggagagtcactttacttccaggaacccggtttgctacttcctgcgcgaagattttaaccttcgaaataaattcatcatatgaaaatttagcgtcagacaacataagtctcaacctgttgggtttcaaaattagcaataattccaacgataaaccaatcgtgttcaccttcgccacaagaaattttaacttcagatgaaccgcctgaccggtcaatagaaaatttaataacttcgccgtttggaataagtgcattcatggcagataaaaactctgcatgcattttggctacttcagatggagtaaactcatctgttaaatgattagcaacaacttgcgtaaatgatacttttactacttcggaatactttggaaacattatactttcctctaaaaatcaccgtgggctacttgccagcattcaacaccgatacgacgccacatttcaactacctgcgccctgtcatctactgcaagttttacattataacgatcagcaattcggtcccagaagatttcttcttttaccacatcgtctttgcgtgaatcgccttgcttacgttggaagtgttcgcctgtttcgccaacatggtccaacaaccatttcttcgtaatgcgttgataaacagtagggtcttctttagtaccagactctctaccagaaacggtaagaattttatatcctttgttacgaagcattttaagaaattcaattaccatttcctttggatggtctttaccacatttggccaagtcataaggagaacgatgattgttatctgctaacgtgccgtcaaggtcaaagataactgcttttggcaatgattcgtctggaatgtacaaatcatatggatgcatcttagaatagaagctacgaagcacttcaataggaactgcattcgcgccacgatagaggttacgattaagcaattcagtccaaggaacgtcaaagcgtttaatttcccacttgacaccatcaatttcgtatgccaactcttgccacttcttgatagtcgttggattaaggttagtatcagcaatgatgacacctttagtggtttccatctcgagtagagtcttcgccatagaaaactgacatacagatacggacttctcacgaagcttagaatatttgtaatcattacgtttatcaaggccaaagatgccttcacgcaaatcatcacgagacaaaacataccaacctggattagatgctacatattcattagcccaggttgttttaccagagcctggagctccttgtgtcaaaaccaattttttcattatacatccttaagagtgtcaataaaatcatgaagagccttagacttttcaccccaattagcacgatatttttctttaattgctcgcaatggcttattcattgacagtatatcatttttgtcataattttcagccgcgcgtccaaacacgatgcacgctaattcattttcagcaattaaccctttaagtgtttcatactgttctcggttcattataataccatcacttaacgcaacgaggttctttaaggtcagaacgataataacatatcattccattagcatctttagtataacgtaaaatgtcattcatccagatgcgatactcttgagactcttcaaacggcataccaacccaggctttaccgtcaattacttttacttcccaatgtccttcccatttttgaattgggtctggccactcaggatgcaaaaccgggacatccggtgcactagaagaacatccaacaagtaggctgataatacccatggctaatagacttcgtttcatctggtagcctcctggatatcttctgcaaacttattgaagcttgcattaatctgtttttcaactaacccaggtttagctgcaactacgtttccacgcttagcatctttattcatcttagcgttagaagtatcacgcgcagctcgattttcctgatagcctttataggttgtctgcagattttttatagaaacaccgatattttctatttcttttgcttgtcgatcagattcatcttggacgactttgaggtcagctttaagattttctacccgccacgaaagatatttcaatccgcctgcggataatgctaacactccaatcatcaaccaagttgtgtttattttgagcatagtttaaggataacctctacgatatcatcacgggataatcccgaaatgaggatgtgacgatcagaactttccgaaggagaacacttgaagcaagcttctacgtattctgccatttcagaataattcaactcgcgatgcataataccaagacgatgcttgccataaatcgggtcaacgattacatagcatttgcatccgttagcatgaacgtttggctgggtgatgttcttgaacacctctgcaccatacttcgcgagatgattatctaggaaatcaatcatttcatctacggcttcaggaagggcttcggcacgctgctcgttcacacgattagtgtactctttttgcttcttacgagcagcttccttgcgcgccatgtgcgtccgtaggtcagtgacaaatcccactttcttggtaccattccacacaaaaattccatcagaatgagtaccatatttgttaacaaccatatctaaagtaattgcttgcatatccatttcaatatcctcatcagtttgtgtaagtttatagtatcacactctgacgaggatgtaaacaactattcttcagaaatttcaatttctttttcgtactcttttggaacatatcctgcccagtacttcaagaacactctttcgaggtctttaagcagtttatctacatctacagttccttcgtacatgttcatgataacaccaaaaagatgacgctgattaaccgttgctttctgcgcagcaatagcataatctttacgagcacgacctctgtattcatcgtagaacgactgacatagctcaagtgactttccgaggtaatctagataagcttgctcaaatgcagaaattttcttaattgcatattcatctccagcaaaaagagaacgcaagtcatcagagtttgcagatacaacagacgcaaacaatctttcatttgacgttattgagtctttagtgtgatgaagagcagaataccattcggttttaaccttaaatctctgcccagtgtttagaactgcaatgtatccttctacgccttcaagcgcacgaactccttcaacccaggtagtagggtcagaaattccgtaagcattaattaaataaggacgaatcttagcattagcgtacaaatcatcatatttaatatactcgccagttgtgttattacggacgtttaacacaaacagctgtggctcctgatatgctaaaacaacacgattattaggtgaaacaaattccatgtttaccgtataaccatctagcgctagctcaagaataacctgatgaagcgaagaatattcttcactgttaagcaaagctgaagcttgtcttgcctggtcactgtagagagatgtttttgacttaaggtatagatacccatcatcaacataagatgatactagagagccatcagccttatccataatgtattctacatcactaatatcaattcccatcgttagtgggttttcattcaaattgaagaatttttccatcggacgcgaagcaattcgaattggggtatcgccatccatctcaaacataataccacggcattcgagagcatcaggttttaaccactcactgtagcttgcgtagtgatatgaaaacactctgaacttaccatccataggaccagtaaaatctttataaaagaattttgcaacttctgagctttcacacagattcattaaatttttatatagctctaacatttctttaccttatgttgtgtgttccatggaggattgaactttttaataaacatcggttcttccaagtccatagtggatattgacatctcgccaagttcattattaatcaaaagattaaaacactgacgagcatagaactctacttttttgccagccattagtgcttcaaaaatcttggcagatttagccgaatcagaggtttggtctttccgattaatagcagttctataataatttatacgtttacgaagatttttagtcttaccaatgtaaactagttcatcatcaactgcgatggcataaactacgtttaacttgtttgctatcaaaattggtttgattgtaaaatctggttctaactcaagttgaacatattttataaaagaaaactcgttagcaatatcattcataataaagaggggccgaagcccctttccttataagtactttttaaatccaattagaacatcatcagtgacatcattgtcaatctgagctaccagataagaacttatctcaacttcctgaggagcagattggactgcatcagagttaagatattcacgaatccaaggaataggatgtcgagttggtgcatcagtaataggacaaggaagaccacaactacgcatgcgagacacagtcagatagtcaatgaagtcatgaagaattttaacattcagacccggaagaccaccgtcgcggaaaagatggatagcccaatctttttcttggcggttaacttccatgaagattttaattgcttcttgttcacactctttagcaatctcaacccattcttcgccatcagtgccagtttgaagttgacgcagaatgtactgtgtgcccttcagatgaagttgttcatcacgagcaatgaacttcatgattttagcattaccttccatgatttccatatttttatggaagttgaaggtacatgcaaaactaacatagaaacgaatagcttctaatgcgttaataacatgtaagcaaagataaagagatttcattaaatcacgtttagcttctttaatttcgatattatcttgattaaagcagcgatttttggcattttcccatgcgcgagtcttcgctataacatcatcatagtaaacaccaattgactcagcgcgtttcatgattgcttcgtcaagaacgatttcatcaaagattttagctgggtctacatataggttacgcatgatatgcgtgtacgaacggctgtgaatagtttcactgaacgtccaagtctggttccaagtatctaggcttgggtcagaaataagtgcagataaaactgctgctggagctcgtccttgaattgaatcaagaagagattggtacttcaagttatcagtgaagatattacgttggtgttctgggagtttttcaaactgaccacggtccatcataacgttaacttcttcaggacgccaaaagaaactcaattgcttctcaatgagttcctcgaatactttatgacgctgaatatcatagcgtgcaattcctagaccagaaccaaagaacatcggttcggtcatgatatctacttgcttggtattaaaaactgtactcattctatttcctattctgtggtgttaaccatccgtggtctaattataattcccttttattaaagcttacaggccgcgcagtcagcagagtcttgaatcatatcatcgttaccggaaccatcacgggtgttatgatagtaaagagtcttaccaccaaagtaccagaaataaagcaagtcgtccatcattaccgacatttcaactttgcctttagggaaattcgccgggtcgtaataagtattagcagagatgctttggtctacaaatttctgcataatcagaacctggttcagataaggcttattaccctgtttcgcgagctgccaggcataatcataaagggaagcattgtgttcaacatttggaacgacttggttgaagcttccttcttttgattctttaactgacactggtccacgtggtggttcaataccattggtagagtttgatacctggctagacgattcgcatggcataagcgcagataacgttgaatttcggataccgtatcgcttgaggtcttctcgcaggagttcccagtcacagacatagtttggagctgcgagttggtcaattctttcgttgtaccagtcaataggcagttcaccacgtccgtatcgtgtttctttgtaaagcgtgcacggacctttttcgctagcaagtttaacggaggctttgatgagtgcatattgaatacgttccatcatttcgtgagtaatatcattagcatctgcgtatgaagcaaagttgcttgctaaccaagctgcatagttagtaatgccaacacctagtgctcgacggtctttagcttttaacgctttgtctacaggataatcttggtaatccaaaaggttatccaaagcccttaccattacttctgcgatttcgttgacttcttcttggtcttgccagttgaagttgtcgagcacgaatgctgcgagtgtgcagagcgcgatttcgccatcttcttggccaacatccgaagttggtaacgcaatttcgaggcagaggtttgattgcttaaccgtagccacatcacgaataaaaggaccatattcaccaacattatctaccatgtatggataaattcgagcagtaccagcgcgttcagtaaggaacaactcaaacagttcacgggctttaatacgtttctttcttacgtctgggttcttttccagctcttcatataatgtacggaacgcttgagcgtcacggaagtattctgtgtacaaagtaccaagacacgcatcgggactaaacagagtgatgtaatcattcttaatcaaacgttcaatcatcaggttattaatctgaacaccataatctaaatgacgaatacggttttcatctacacctttgttgttcttaagtacgaggaggttttcaacttccaagtgccagattggatagtacagtgtcgccgcgccaccacggactccaccttgggagcaagatttaactgctgtttggaagtgtttccagaaaggaataactccagtatgtttgacttcaccgaatccaatttttgaaccctctgcgcgaatcattccagcattaataccaatacctgcacgcttactgatgtatttcgtaattgatgcagcagcttcgttaattgaattaagactatcaccgccttcaataaccacacatgaactaaactgacgtgtcggagtacgaacaccagacataataggagttggcaacgaaattttcttagtagaaactgcgtcatagaaacgaataacgtttgctaaacgattttcgccatcatcttgatgcaggcacataccgatcagcataaaggcaaactgtggagtttcatacaattcaccagtgtgacgatcttttacgagatacttctcgataagttgcatcgttcccgcataagtcatagtgaaatcacgctcgtgcttaatgtaagaatcaagcaaagtaatttcttccgcagaccacttactcagaatttctttatcatacttatttgcattaacacaccgggaaatgtggtcaataaaggcaggtggttcaaactgtccataaacacgtttacggatttcaaacatcgctgcattggatgctacatattgataatctggctcatcaatagaaatgctattcgccgctaccttaacgatagtcttttggatatctgcagtgctcataccatcacgcagatgggatttaataatttcatacagctcgtatgggtctactttagttccttcgcatgcccattcgaggactttaatgattttctgcatgtcaaattcttgactaacacctgagctcttaattacttgcataagtcctctaattcaaatgtatctttaaaaagtttattcactacaagagctattatatcaccatggcaaggaagcggtttgcaggtgcatcctaatctcattcctcttaaagtttctaagtgctctcgctttatttctccgttccgaatcttagcaataaaatcgtccttaaacgctgcaatagcatcaggacgattatcgcaatctttaccgacgtaatttccccacattgttccgcgttggatatttacatcgaagtcggaatggtatttattaaccacccgacatatcttcatgttatatcaacttcaaaccagcagattaattgtgttttgccaatagaccattcatatgatttaacaatagacagaaccctttgttcggttccgttaaatactattgcgtcattaatttcaggcaaatcactggagaatgcatcatacatttctcctagtacagttttagactgatgtcctttacgaacaaatcgaatattcatatcgccatctttcctttaattgttgggtgagattcatatcctttaagaacaaagtcagatggtttcatcattcctgtaacccaagctaattgttcttctgttgctaattcatgaaattctttatcttttactggaggccaataattaatttcaagttcacacagctcttttggctctcgacgcaagatttctttacactgttcaatatggttcagataaatgtgagtgttaccaccagtgaataccaaatgcccaggtttaagattggtcattttagcaatgatatgaactagtgctgcatatgacgcaatattgaagggtagaccaaggaatacatctacagaacgctgataccactggaggtccaaatatccgttacgaacgttgaattgataaagcagatgacatggtggtaatgccattttgtccaaatcaatcgggttccaagcagttacaatctggcgacggtcagatggcagttgtttaatacgatcaatgactagttttagttggtcaacgcccatgaaatcacgccattgctttccgtacacgggtcctagctcaccaccggaataccccatgtcttttgcctggttttcgtagttgtcgtcccaaacagttttaccttctagtaatgaaccatgctgaataagacgcaattcatggacattagtagacccctgcaagaaccaaatcagctctgcaatacacgctttccatgcaagacgcttggtggttacagcaggaaaccctttttgtaaatcaaaacgtagctgagtaccaaacttcgcaatagtgccggtaccagttcggtcatccgtctcataaccgttttcaaaaatgtctttaattaattcttggtattcacgcattaaatttttcctgaagaggtgtaaagaaaagctgattaccacgcttttcaaatcgcccaataatagacactacatcatctttgaccatcacattgccatgtgacattccgatgaacatcttcttataatcacgttcaatttcaataggtatatttccatttcggttatatactgtagttgaaccgttataagtgctaagaccattataactaaaaactagaagatgaataccatgcttaaatggaaatcctttccacttcttttggactttatcttctgatagctgagtgatatcatagtttgcgctcatagaccacctctgaaatgttagtcacttcatcaatatgataccagtgattttctttagtaatgaatcctgattctggccaagtaggagctgctacaaattcagcaggtagagtgacatcagaattcactctatgactttttctgatgattgtttggataaccctatccgcgtatggatatgccttctggatgattccagcaccacctatgatagaataattaaggtctctattaaaagtgatagtactgttgtaagaagtatgagcggccataatgtcaccacccaagaaaccgataaattctaattcacttacataagcatctgcaaagaagccatttttagcagttgctaacgcacgactcatgtcttggacaacgattgtcttacgaccaggaagaggtttaggaaaactcataaaagtctttgctccgcaaatcaagatagtatctcgagtacgattagcaaagtttttcatgtcctgggaaatatgtttccatggaagaccatcgcctaaaccgaaagcattttcatttttgccgtctacagtttttgtaggagcaaaggcataaactatttgaatcatttaaacctcagcaaaattcaactcgttcaacattgccgtcttcccacttctgttgaagctcttgtaggcgtttaattgcactgtcgacattggacattgcgcagatagttacccattcacgaccgtcccaccaaatcaaatcatcataatcatctacggcgaaattttccattagccttgcctcattccacacttaaaacaccggccacctaattgccataggctaccgccacagtacttacaatcccagtcagttaaaatccacatgacttgtacccactagctttaatcatgttctgaagagttttaaatccttctttaatggcttctgcaatttcctcaaatatttcctttttcagaatatacaacgaacctgcttgttcaccagaaatagctgaaacaacaacttggtcattaattaaaaattcgccatacgctgaatcaattttacctgaaacctgattgcatcgcgaatgagggtcaaatacgagctcaatatgagttactccagggatttcgtcaaattggcagcgaatattaacgcgaggatatcccgttacactaaatttagacatataaaaataatcctaatataacgccgctaataaaagcggcagtaacagaaattaacaaaactactaattcagcctcaatcatttcttggccttagcaagtttaaatgcttttttgaattcttcaacatcttcaacaggaatccagaagcctgagccatacccatcttcatagcatgggcagttatcacagtaatcattccaatagacagtttcaccacccatagtgaatggagcttccatttggcacagtacttcttcaacacgctctaattcttctgggtttttatcgcaaatgcagaaattccatttaccacgatattcagaaccaagtttgatgctttgacgttgaagtttcattttttattctccagtagattatggagctatactatcacaagcatagctccttgtaaactactttttgaaaacttttttgatcaagtcaatcatttcttctgcattttctggggtaacgatcaagtccaagcgagtaggaccaggttggattgcactaccattttcatataccggttcgaagtatttgaattcataatcagagatttcaaagtatgcgtctccaaatccttcagcgtcagcagttgttccatctttaaattttacttctgtgatgaaactattatcttcgtcgagcattttagtaggaaagaacgaaccgccatgctcttcaatcatcaagcgcatccggcgatttccgctagatgaaaggtcccactcggcagcaaggcttgggataatgcgatattctgtgttcagtttcataatttacccactgaaagtagttaatgtatcttcacggcattcatcatccatgccaggaaaatattcttgttcaagccataaccatagggtaggagtatcaccttctaccgttatttcgtttcctccccatggggcagacttgttactaacttcaatcaaaccgtatttttcaatggtttcaatgaagtgttcataatcatatatttctacagtaacctgtgccattgtcatttcctcaaagtggggaccgaagtccccaaaggtaattactctttccagtcttccatcatcaaatcaatatcttcccactcgtttgcttctaaccaagcacgaaccgcttctttagaaccacggaggtcaatatttggccaaccgccaccagggccttctttaataactaaatcaaaatcaataccatggtcagtgtcataaaaacgtgaaccatcttcaaaaatcaaatcagtacaaaatcctgatttattaatgtaaggttctgccacgatatcaatgtttaatttacccatgatgttttcctctactcgttttgtttcgatgtagatatagtatcactcatcaactggcttgtaaacaattttgtgaaaatattttttggagggataaagaaaaagggacccgaaggtccctttatattagaggtcgttcaaaatgtcattcagatcgtcatcgccaacactgtcaccagcatcgcccatgatatcgtctgcggaacgagaagaggtcggtttggattcaaaatcagacaggtctttgtcaaaggaatccaggtcatcaccaattttatcggcttgagctgctgcttttgccgcggcaccaccaagagctgctgtacccataatctgtttaaatttggcttcgttaacttcaaacgatttaaactgagatggagccacaatttcgctgaggtcagccatattttcggtcaggaatttctgagtttcttcatcattgatgtttgcaatctcggactgaccaaggaatttacattcatcatagttctggaaaccaccgactttcttaactttcatgacgaagtttgcaccttcatacacacaagttacatcaaccggagtttcacccatatcaacatcgacttcaaccatcgcgttgattttgtccataattttctgaccgaaacggaatttgaatactttgccttcgttttctgggttagccgggtctttaataaccaggatgttagaccagaaagaagttttacgtttcagaagcttatattcagccgggttgctgttataagaatcgtttttactcagatgagcacaaaccgggcaagaatcaaaatcaccgtgagtagaagtacaattttcgatgtaccatttaccgccgtgtttgaaaccgtgattgatcagttttacaaacggcagagagttttcatctttaccaggcaggaagcgaattactgcttgaccattaccagcattatcggtcttcagtttccattcgtttttatcttcattagagaaagaagaaccacctttcagaccggccagttgttgctgaagctgcgctggattttttcttttgaacatatgattacctttttaattttaacagttgttgttgcaacatgggtccttgcaactggacgatagattaattatatactaatttctttacaagatttgattatgctaataaagagtttcttagcttcagcaccgtcaacgtttaaaagttttttataagcttttaatttagtggagtaattactccaaactaagttatccgttgcagtatcatgtgtatttattatatctaaaaacgagtcaagcatgataaatgtctcgaaagatataacatttgactgaagaagtttgaacacataagatgttccgactttctcattatattcaaaaatatcatgaagcttatctacattaactttcttagcaaagtagtaaatattctttacgtcttcagagaatgtagttttgatttgcttcaacttaccgatgtattcacgatagaatatcaacgcgtcagcgtcactgatatcaccaatccaagcgtcttgattagctacaagattgctcatgaatatcagagtcaattcctttagcgtatacttctcggcaagtttctcaaagaagtatttgtctctgcgcttttgataagctttatcagagacacgcatgacccaattatacttaacaacatcataccgaccagcgaagtgctgtttgagcattaaatataaaagataaacgctcttaccgttaacgtatctattattgttttggggcatgcggagacgaatcataataaaaaatccagactattcgttttatgtgtttgactaaatgatggtcgaagcatattttcttctaatgcttctgacataattttttctatgattgctggaggaatatatctattgaagtttccctcaggaatagaattttcttctagccattgtgtcgttgcctcgagataccccattccaagttctgttaccatagattcaatagcgaatccattagcttgcttatctagcagctggttaatggattcggagggggatgtgtccccctcgtctttaagcgaaaatagagtcataagcttctaccacttcgtccttttcagtttcgtaacgatcgcgtgtacctttatggaacagggcaagcagctgattaaacagttttccttctacgccaagttctttcttggcgcggtctttaatgtctttgttaagctcaagatagctttctgcttttagcttattacctgaggcttccttaatcatatctcgcagagcctgtccgtgtactgcttcatcaaatactacttgctctttttctttcttagccattatattcaccttaaaagttgtttatttctttcattaatttagacagaccggatttaacaaagtagctataaattttaccacgacccggtagttgatagttattataacaatctaaaatgttagcaacaatgtcttcacggatgtaatcaaaatcgattaacacacgattttctaagaaacgcttatactgttcttcagtaagcaaatctttaatgttttcgccagcatcaagacactcttcaacaaacgtcattttcgttgaaggagtacgctcgccatcaacatgagtgtaccaaaaatctgaacgaactttaatagaagctacgttatctttcttatcacccttaataattttaaccatgcaatctaaagcaggagagccagttttagattttaccaatttcttctgcattggtgaccattgcttaacattaggatacttatgcaattgagtaaagtcaccatccgaagaaacaatcatgactggatgaccttcgagactgaactttttggttaatactgcaatactatcatcagcttcagctttatcaatatcaatgacataataaggcatatactgcttaaattcatcaattacagtacgaagaccttcaaagtaaccttcccagtcccaattagattcttcacgggctttagcacggttctttttataataatatgctacatcccggcgccagtatccgttgattgcattatcaacacaaatgacaatttttgtgtatccatctttcttccacttaaaagcattaaattttaaagtagaaagaataagatgacgaaccataggagtggttagtttatcgccttctttatacgtatgaagaattgtcgccattgcgatttgcgacaagtcaatcagaatgacgccttcttttacttggtcttcttcggcgaataagcaatttaaatcagacatttgaacctcgttcaattagttagtacagccattataaatacttctataatgaagcataaccccataggagactctatgagcgatttactgaaacaacatttccgtgcaacgaacggcttggacgcaggcggaaataaagttataaatgtggcactagctgaccgcaacgttaaaaccgacggcgtctctgtcgagtacgttattcaagaaaacactatccaaaaatatgacccgacgcgtgggtatctcaccgattttgctgtgacttatggacgtcgtatctggattgcaaataaagatattccaaaaccagccggagaatttaatcaggccaattggacttctttacgtgttgacccgaactggatttataccgtccgtaaaggagagtttgaaattcaatcaggacagttcatcaacgttgactcgaacgctgccggtaatgctacgctgttgttacctttagcaccagacgaaggtgataccattgtagttcgtgatatcggtggacgccctggatataacggaattcttattaaagcacaagatactggtgcatctattgtcttcggcgaatcacgcttacgtgaagtaagacttactcgtccgtattcacaaattatgcttacgtttagtaacggtgcatggcgtgctagtttaacagattttggcgatactgctaaaatggtagttccgaacgggattgttccaacccaggttcagtcaggtgataacgtagttcgtcgttatacttccaactcagagatttttattactctgccgttgttcgctaattcaaacgatatcatcaattttactgaccttgatggtacatcgccgattaaccatatgactgtgcgtacgtttgacccaactatctcaattgggactcccggacaaacggaaattcaagtacgtacttcaggtaatggatttttggtgtatgacgctattgacaagatatggcgtatctttgaaaatgatttgcgtacacgtgtaagaataattacttctgacgttactttaatgcctaatgagcatatttctgtatttggcactgacaatagtacagttaaaacaattaacgttactttacctactgacgtagctgttggtgatactgtcaaaatcgcaatgaattatatgcgtaaaggacagaccgtagtaattaaagcttctgatggtgataccatcgctagcaatttgaatttactgcaatttccaaaacgctcagagtatccacctgatgcagcatgggttcaatcaagctcgattacctttaacggaactacgtcatatgttcctgttcttgagcttgcatatattgaagataaagcatccggaaaaagctattggattgtaactgaatctgaccctaccgtagaacgtgttgatgctaaagacaatactaccagagcacgattaggtgttattgctcttgctacacaggctcaagctaacgcggagtcaagtccggaaaaagaattagcaattacgccagaaaccttaaacggacgtcgttctactgaaactcagactggtatagcaagaattgcaacttccagtgaagttaatcaggcaacaactgcttcttacttggataatgtaatcgttactcctaaaaagcttaacgaaaggtctgctactgaaactcgtagaggtttagcagagattgcgactaatgctaaaatggatgcaggaacagatgattttacgattgttactcctaagaagttactttatcgtactacatcggattcacggttaggtgttattcagttagtaaaaactggtggtgctcctaacacaactgctgatcgttcttctgctggcaccggtatattcgatcattctgattacaaaaatgcagttactccaaaaactcttcgcgagtataaagctactgtaaatcagtcaggaatagtttggttagcaactgatagcgaagttagaaacggaactccggcttcttcaaatattcctacggtcgttacaccagaatctttgcataaaaaagttgctactgatggagcaattggattaatccaaatagctacacagacagaagttaatgctggcggcgtgactaataaagcagttacacctaaaacattaaatgaccgtacagcaactaacgatcgtactggtattgctcgcttcgcgacacctggtgcccagggtgaatttgaagctggtacttcaagtatagtaatggtaaaccctaaattactgttcgataaatttgctaataccgatcgtatccaagttaatactagttctggcttaactattactgggaacctctgggaccattataccatcaacatacaggaagcaagtacttctcaaagaggtacaactactcttgcaactgctgctgaggttagaaccggcaccgacgccaagaaaatagttactgctgccacgctacatgctaaaacagcaactgaaggagctatcggtcttgctcagtatgctacgcaggcacaagttgatgcaggcacattaagtgatagaattgttcctcctgcttacttgaaacagactattcaggtaacagagtcatggcaagctacagacagcgttagagggaccgtgaggctatctacaggcgatggaacgtggaaaggtaatgataccaatggctcaactcttccggataacgggtatgcctctaagggcgtcgcagtgtctccgtatgaattgaacctcacattgaaacactacttacctcgtcttggtaaagcctatgacaccggaatgctaggtggtcaaacaccagacaaatatgctcgccgtgatatagcgcagactatttctggagcttggacgtttagtcaggacacttcatttagcaataatatttctgttcagaatattatatatgctaatggtggtgaagtgaagatttctccaacagctgataccggaaatgtgcatgttcgttttcagaatagagatggaactgaacgcggcataatttatgcagaaacccaaacagcttcagccggaaacttaaaagttcgtgtcaaaaacggaacaggaactactgctacaagccagacctacacgtttggtggaaacggtacattaaacgttcctaatgaagtatcagctaaaactttgaggtcttctggaaatgcaatagttggcggaactgttatggttaaggacgttcagatgcttgctgtcgagggattgaattcaatattcggtgcccaatcacagtccgcatttattcgttcccgtgacgctgatacacaaatttttgcacaggattcaactggatcgtatccaattttaactaccaaaaactacgcaagattagctgatggacgttacgttaagaaagctggtgacaccatgaccggcaatctcaacttaagcggttctgctatcgtcattacgggttctgaatcgtggtatgtgccgactaatgatactgtattgcgacaaggttcttggactgctgaaatcaaagacgctactaaattgaaaggtcttcgcggttatatggttccaatcagaacaccgattgacccgggtaacccaagcactttagtagtgaccggatatgaagaaaaaactgcagctggtggtgttttaactcaggttggtgtaactacaaacaatacttatcagctttggacaccttatcctccaacaacagaaactgctgataagcgtttcgcgcatactgtgtggatgaggatttataatccaaaccttaataagtttgatgattggatgcgggtatttacatctgctactcctccaactgcagctgatatcggagctccgagctcagtatcaactcaggttaaaacccttgaagtcctggaatggattaagcttggcccagttaaaatctggccagaccgtccaaaccaaactctcaaatttgaatgggtaggtgattaatggctgaaccaattttaatggcagcctttggcgaggatttcgtggaaacacgaatcctctctgaggcaaactctgtgaagtattggctaaaagcttatgctacacattctaatgctgttccgaataagccagaactgaatattaacggtgcttttgatatgacctcctccttacggagggggattaatgttgttcaagttaatggtgacagttttattaactttaaaacatttgacgttaccactgatgataacaacgctaataacaaagcgtttgtagaatatgcaaatggattaacttcaggattgtatattataatgacacatgaacgatttcaatccagtccgttaatagacagatggtttaaaaacaagtggtctgcttcttggccaggttctgacttttctaaatcatttccaaactccgcctatgttggagtgctcggagcggcaaaaggacgtatattaattgagtcattttacggaaatgatggtgtagtcaaagaagattccagagctaaagtagatacggtatatgataatgtgggcgatgtaggatatactgggtgtccttatcgttctattgaagataccaatgaatactcggattctactggatatgaatataagcgatacccagtacaaaatgaatctataagcaaaatcgctgattatggattatctcccggggattcggtgtttttagtgtgtgatatgtatgcatctaaaagccttcttgatgcgggttctacaactagagctagcttgcgatggttcaagggtacatctttgttatcttcaaacgtatcattagaaattccaaaaaatggagctgatagatggttaagatttgaaagatttaccgctgttcctacggacgctgatggatttactattgtggtatcaagatatccaaaaacgtctgtagttggtgactctaaaatcaaaaaccttgtatttgttcaaacctctcatagcgaaaaactgaatagcgttgttcaagaatttggtgtgaatggcataagaatgaataaaggcgttgaaggaggaaccactatgattatggaacttccaaattcaaaagtcgatccgagcggtgttattccagttcaatcgttcagagaaacatcagactaaggaagccttcgggcttccttttttcgtataaatagaaaatatataagaggataaactatggccgatttaaaagcaggttcaacagttggtggaaatcctatttggcacgcaggtacttttcctcttgtgccggcaggaaactccctaacttatagaggtaaaaaggtttatactgagatagataaacctcaagcaaatgataacgatttcgtatctaaagctaacggtggcacaggttctcaaggtttccagcaagaagtcgaatttaaagctggcgttaagatttccgcaacgttttctggtggttcaaacttaaatgggttgtattctggtaacggagatggagataccagagaaaaatctaacatggatttgcgttcatggtacggcatcggtatttggaactcatgtacaagtgatggggtccagggacgcacaatctggttcagtgctaggcgtggtactatcggaacagttggtgatattgtttcaggtagtcaagttattgctaacgcttcggccccaacagccgcccagcatttaactcgcaaagattatgtcgatggacgaataaatactgttagcaacgtagctaacgcagcagtcaggaaagctggtgataccatgacaggtacacttagagctgaagctggcgtagttatagtaaataaagcaacatccggtgaatacgctcctagattagatcaggttatttcacgcggggtaacaatagattttggcacatactaagaggtagccatggccgatcaaaacttaaaacaaatacaatttaaaagaactagcacagagaataaagcaccaggtgcagatatcgtagcccgtggcgaaatcgcgttaaatacccatggacgtactctcgctatctacaccaaagatgaagccgataacgttgttcagcttgcaggtaaaggtgttcctttcttagatactgcaggtaatcttaatgttgatggaactactacgttaaaagacaacgttactatttctccgaataaagcgatcaattttgaagcttcggatttaagcggagcattagtacgtcatatcaccggtaagtgtgctaataacgatggctggtacattggagctggtggcgcatctgaccagggatttcttgaaatcggtacgtatgataacggaaacgaacctatctattttgttcaaagaaccggtggaacgactcaagctgaagttcgtcgtttagcattattagatgggtttggcgatacctctatacctggggaccttcgtttaactggtaaaacggtaaaaatttcaaacggcagcactcttactttggaaatgggtgtaggttctaatgacgcatacattaaaaacctgagaggagctggtgttcttcaattaaccaatgacagtaatctgacattcagaaattcacaggtttattacgccatgaacggaagaggtcctggtaaatccggtactcttctgacaaatgtagaaaacaatcgtcaggcgtggcaatatactatttctgctgcaactgctggaactccacgttgggttaaagtagctacaattaaacacccaggagatgcgtcttcacagttagatttaatgattactggtggcattgattctggacacggaaggcattatgttgattttatcacgttatcaggacgaaatttaacatcatggagcaccaacagtttagataactgggttgaatggcgccgggttgggtctccttctaaaacgaacgttccagagtattacgttgttaaaaacgattctgctacagattcagaggcttcatttgatttttacgttaaggttcctcgatacggcaatgccctttatgttacagtgctaaacaccgctggatataatggtcaagatagcggtaaagtaattatctatgaaacaggtcaagatactggtgctactgcaccatctggaagcattcttgtttcaatgaaacagatttttgatagtttagcaaaaccagatttcggcgatactaccggtactcttccggttaaccgcggtggtacaggtgctactaatgtaggagacgcccgaaacaacctgggccttagaactgcggctgttcgcgatgttggtgaatccaacggaaacgtgatggaagtcggcgcttttggtgttggcggcgccggaaaatcaattgttgatattacatccgatgtcgatttaatgaatcgccttaaagctattggtggtacaacatttagggctaacgttaagacagtaaatgggaaagctgagtataccggttctccttattattcgcatggagcaggattcttttctagaaccggcgatacaatggctgctcttaatatcgattattcatctggtaatattaaagtatttgccatcaatgaccgaggtttagcagacggtaaagtaaactataacatgctctatggtactgcaaataaaccaaacgcagatgataacgacttcgtatctaaatctcgtggcggtacttatgacgcaagtattacagttaatggtgatattactgctaataccgtcagtggtagggtgttaaaattatccggtggcggcgggtcatttgttcctccatcccagggtgcttatgtatcttggaacaaagagaacggatcaggtcgtactgattttattaaccatcgttcaaatacttcaactgttcctggcggatttgatttttggaactatgaaggtaatacgagcaacatgcgtcatctggcgcaaattagaaacaccggggatttagtattattcccttctgacatatctaaagctgtgacgttccagactgatggaaacatcgttggtggtactttattcggtggaaacttaaacaattatttaagtaatttaaccggaactgctaatagcaaagtatccaaatcgggtgacaccatgactggcaggttaaacgtctaccaatctgatacaaatgctggagcccaggctatatacattaagggcgttcagcatacaccagtagttcttgaaagaaatactgatgcaaacttatcaatagcgttcagattgactggtgttaacccaattcttcaacgcaagcttggtttagctaaagatggaactcttcgttggggaaccggtgataaccaaactgataatgctttagtatttgaccaaaacagcattggaatggttagagttaacatgaccggaggttatctcggtccggaagtcgctgaagacatcggtggaagaactttatctatcgatgatcttttcttagactctaacgatgttggtactcgtagagtatattcgtgtttagctcaaggacctggagcaaatattactggaatgcctccagctttaactaatttgaagggcgactttcttgttattgttgaaaagatgcgatcagcttcgggtgtagatttccgcaataaacaaacgtttatatctggacgtaataataaaacctactttagatatggtgctggaacaggaactacttctgctactgctgtcaattggacgccgtgggaagaagtaataactacatcaaacagtaacggtattttaccaatttcgtctggcggtactggggctaatactgcagctgatgctcgtaacaattttaacttaggtttagggcaaactgcgacgtttggtggattaattgttaacggtgttggaaataatgatccggtagtcacgtttaagaatggtgctataattcgggaagctcaaggtggtagtattggcgcattaattatgtcagcttctactgcagccccaacagccgcgaaatatattgcttttcgtccttacggtgatacatctaattctgagattagagtcaaagcatatggcaataacgagacgatgcttgaatgggcgcaaggccctgctgttcgttcaaacactgcaggtgcttttgtaatctatgcaaaagccggccaagcgattcatttaagaccgaatggcgatactgcaagccaatcaactgttattgatcaaaccggtaaaatgacagtcggcggtgagttcgaggcccagaactcgaaaatcacaggcaacttgaacgtttctgaagataacagaatgatcgttcttggcaaaaactctgatattggtttagtcaagaaaaacggtatgccaggaaaaatggctatcggtaaatctaactcatttaccgttatggtatctgcaaataccaacaaccaaattaatcctagtgacacgtttagcgatatattcaaagttgatgctagcggaaaccaaactgtttacggaaatgcccaaattaacaggcagcttacagtaacaagtaatactaacttgaactcagacttgatagttaaaggcaattcccgcttcagcggtgtgattaatgctgatggaaacatcaacgtcgcttctggtaagtttgttattgcaggtcaagctcctactgataactcgcacctaaccaacaagaaatatgttgatgacaaggttgcttctgctattagtaatgctggtgatacttatcttccgttagcgggtggtactgtaactggtacgttaatagttacaggtaatcaactgaaaactacttctctgtggactaccggagacgctgcagttaatggcgttttaactgttgatggaagggctagatttaatcaagagttcattgtatcaacttcagttaacgtccagaacaccggtaatagtcatttagtcttccgtaaagcagatggtacggaaaaaggccttatttgggccgatgagcctggtagcgttagtataagagctggtggtatctcagggaagacgtggaatttctggaacagcggttcttgccaattcccaggtgctattagtaactttaacggaattagctcaactactaattatcccgcaggacagcctagcggtacgtacagtaataccgcaggattggtaactagatttagtaatggtgcttatgcttcgttatatttccaagagtatgtaggaaattatcaccaggctattcttaatgttaacggattcaatagagatgacaatttctatttcagggccggcggtgacttcttctgtactcgtaacggttcttttgataacgttgagattcgttctgaccgtagagctaaatctgatattaaagttattgaaaacgccttggaaaaagtagaaaccttatctggtaatacttacgagcttcataacacttctggcggtattactcgttctgcgggtttaatcgcacaagaagttcaagaagttcttcctgaagcagttacgcaagataatgaagaagatggtggtatgcttcgtctgaattataatgctgttatcgctttacttgtagaatcagttaaagagcttaaagcagaaattgaagaacttaaatctaaataatgtatggggcttcggccccatctttaaggagatatcatggcagtaacaggaccatgggtaggaagttcggcaaaggccgttactggtgaaacctggatggcccaggccggagcaaaattgagattggggacaccattttggatgtccaacatgataggaagaaacgtttggaatgctagtataactatttcaggtaacaacccagctacgggtgctagggtacgtggtgcttggataactaaaaactgcgcttcatggaacgtaaagctcgacgctcgtgggtctttatcaggaatttgggaaactgggtttaatttggttgcctttggattagcagagcctagtagatgggatggatataatgatgcccttgttctagaaggcagtggaaactttaacgttaattggcgagttgataccgaagacggcagacaatggcattttgttagttctagggattatatgggccgccgttgttataactgtactgacaataatggattttgggattggctttatggtaatgatggacgaactttccaactgtcgtttacagcatattaagcatatgctagagcaataaatagctctgtaaggagagcaatatggcaagcaaacaatcaataccattttttgatatgtttcttgggttgctcgagctattattcaaagatggagccacgggaagagttctcttttcccgtgtttttgttgtcgtacttttagcattgttggcgtttgctggatataagtctgatagtcttattactgcttacgtcgatagtacatatgacaagtatgataaactggttcaaaaggatagggatacccgatttgataatacagcactcgaacaactccagatagtacatatctcaagtggtgcagatttttctgcggtctttacgttcagacctaaaaacttgaactacttcgtagacttaattgcttatgaggggactttacctagcacggtagattctaaaaacctgggaggatatccaatcgacaaaacgtctgctgaatatagcacgcatttatcgggtagatatttttggacggataaggaattcgttttcttaccaacaaaaagaaaaccgcctgagatatcgtatatgtttagctgtccatatttcaatttagataatgtttatgctggaactgttgaaatgtactggtacaattccaaacctgcattatctaacgaaagactaacatcgatatgtggtcaggcggttagagctctaggaagagctaagtgattacttattactatgcatagccattgttcgatagatagactcaaatccctcgttgtattcttcaacgagaattctcttctcttcgtcagttaactcagaaaccattttacgaaagttgctctgatttaactgacgcccctgctcgttcttgattccaatttcattcaagaacgcaataaattcatctcgcttctccatgatatgttcagcattgaacttagtcagaatagaagcaacagtaacgatttcttggacaatttcaaacttagtcattatttttcctacaacttaacggattatgtggattatagtatcatcttgataccgcgttgtaaaccagtttatgccaattcccaacgagaattcaaatcttccttggtagtgatatactcagcaccagaggacatccagagcccgtagcgaccatcttttactttagccgttaaataccattcctttccaattggacgaaccctacgattcatccagtgacatacgtcaattgcctcctgaaaagacaagtcaatcagactcccaagcgcgattttattcattaacgcttcgagatatctttgcgattcaacgacagactctaagttatggctcatgctaaaactacctctccgcgattacctaaaatgctttcgatatactcaactccacttataatgtcacctctatcctttgctttaatagtaataattccatatgagtaaaagtcagccgataaactaaacgaagtgatagtatcgtgtgtaaacctaagcattaccatctgttctaagtcttttacttctatgtcattagcccaagaattaagaactttaagtctaacttgtaaagtgtattctactttaattgctgaaagcaattcaacacgtttatgatatgccttggcttcatcttctctgcgtaaagtttcagtattcatagataatctccaatatcataagcatcaacgcatttctgaaattgctcaagaacttcttcaggttcaacgttagcgataatagctacagtaaaggtgccattattccaatcgtgtaccatccagtccccatatccagcattctggaggtcttccattagttcagaatggatatctgctactaatccagaatggtcccctaatttcttgtggagagcttctaggtcatcacaaataatagttaaagtagtacatttggaattattcagaatgcgcattgtctttacctttgtgtttttgcttacgttttgattctttggcagcacgctttttatctttgtgtgctccgcctttattaaaatcatgtttagctactagattttgcaccttcaagttccttgatgtaatagtcaatatctttaatcatttcttctgtcattattttgtacatttcagcaagaaatggtttagcaccgccattaaatggatagctaaacgggcagatgtattctttatccatgagagttttcatgaatttgctatctgccattttaaacccggcttcattggtatatgtaccccaattatcgtcc

SEQ ID NO: 29 - DNA, 110311 bp, Unknown
  bacteriophage strain capable of infecting bacteria of the genus Klebsiella
tatcattatgaccctaatctttttgcagagttgccaatgatacttacaatcctatttattagtctgctatgtattctgcccggcttggtggcgctagaggtctggtcaagatcaccggttgactccgagcgcgaattagagcgcgaaaaagcaaagcgtgacggctgcccgttgctatagggcggcttttcctcctcagcccaatttaccccacctttaacacctaccctaaaattaaatcgcttagagcgcgttctagagcgcttaaaatcgatatcagcagaaagtgttgctgggaaatactgtataaatatacagtaggataacctgttgataagtctgttgataactcgctaccgatcgattgaggcgtcaagctaatttacaattttgtataactctggggataacttaaatgatagtgtttctcacttcctttttgaaatgcaaatcattctcattcgcattcagctcggtaaacgcaaatcattctcattcgcattcaacttctcaaatgcgaatcgttctcattcgtatttgcatttccgacccccggcccttcctgcgcttatgtgcgaatccgacaatttgtcaagcaaaatattacgtgaggctgctagggtatgtgcaaatccgatgaaaatttatttttaccgccctgggggcatgtgcaaatccgatactaatatgtgcaaaaccgataataatttttagggggaaggcgcgcagtttgctgcagcgcagcggtgggcgcgagtttgggagagtatgtgcaaatccgatgggtatttttgggggagggataaacggggttgattgcggcaattcggggatgatgggggtagggggcagataagggaaaatattatgagttaaataggggtaaaggggttgacacagaaaaaattcctgtggctctaaaaaacaagcgaactcacggtgacacaccgtgtaaaaaggcttgaaatttcaggagatattttatattcgcagaatcgaagattttgatccacagctaccgttcgttagagataatgtgcatatccgacaaccgtttgagtatgtgcaaatccgaccatgatttttatatgtgcatatccgacatagctagaggttagtgcagatccgatgatattttgtgacgcttagaacttaggcatactaggggaattgtgtgggaacttcgtgaggactttgtggagtgacgcttaggacttgggcagctagcgttttaatgtgggggtgtgtgaggacttcgtgagatgtgtggaaattcgtggaattgtgtgagtttctagaaattgctttccgaaaaagtgagttggaaaataaccgccctccccttaggtgttggtggataaccgccctgtatagaaagatgactagagttcaaccctagagccgcgaaacgatggtgtgtaaggattacctacttttaaacgtgagtaatcgtgggttcattcccacgtttccctattttctccttagtttccagtaattaataactccccttagggttttaacgagctatcgcacaccccggctagcgatactgtgcagattgatcaatttttgtaatttcgcactaagtgtcttgaatcgggacagggccctgacacttacgaaattgaaaaatcaatatctgcacatctctagcggatgtgttaactatctatttaatctaacttttttatcttatagagttattctaacatacatctcaaataatgtcaagaatttttacgggagtgtttgaaaaagtgtcacggggtagatgtttaccccgtgaactcgtagactacagttgagaacgtaggttctctaactcagtgaggaaggcaggattcgtttgatcgaaatccttaatgaggaggtgctgatcaaaggagaattcgtagtcttctccgtacagcttaatgaagaggtctggatgttcacgcttcaacacaacatgcgctacgatactcggggtgatctcattctcccctttgtggtaatcgaataactgtagagtttcatgcctagcttctggtttagctggttcttctttctcgataccccaaggagtaacaaacttaggatcaccacctggaaagacagatgcgcgcatcttataaacataagaactgagatctttcatcgctttacttccttgccaaactgcaaagatctcatgtttaccttcagacgctctgacgggtaaataatgatcagggtagctggttaatgcacaacggaaaggatcaccgttatagctaggagcgtgagaaccgtaaagtgtttcgtacttcattcgctcatcttctataatatagagttctttgatttgcggatacgaaaaccactgattgagaaccttaacagcgaagcggtgtgcatatggtgacatcttgagaacgtgatactccgcccctagatcatcttttgccgagctaccgtcttcgttcactgcataacgtctacagaacatctctacgagtctacgctcgttagttgtgagagttgagtatttacgctggtgcagctcataaagctcctctagcattccctccagcttagttaccatttcctcagggtatttggggaacggtttctctactgcattcaatactgtgttggacgaactcttgcgtgatctttgcagtgcatttttaaatctgctcatttttattttctcttatagtccattggactcttttatagccacgggattgtggctcttaactttcttcattccaccgcggatgtgagaacggctctctgccggttaagcgttcaatcatcctccggtgctcccgctctctgtgttccttaaacacctgaagagcggcgaaactgtccactggcgtgtacggcacgccgttaactttgaggatatcctcgcctctgattttgaatagcgggttgtcctgctgggccttagcatggcattcgctcaagtactctgcgaaagatgtgccatcttctcgagtacacagggtacggagaagatagctacagttctcaccaaccggagtccatacttcatatttctcgttcattgtgttatcctcttacataaagaaatcttcatcggattcagctatttctttataaaagccgtgatatgcggcaactgcctcgctaggtgctgccatgtcgtataggcgtgctctttgttttaattctgctttattttggcactgcctaatcatttcttctacttcttgctgcaagcgtgcatctacccgaaccaccagctcaccgtcgtgaattgccccgactttatacgtcaacatcgtgagatagccaggatgctgtcgagactttttgaggaccacgttagtatacgctgttaactcatggacgaatactgcacctgggaacgcataaggagttagcttcttacgagcttttactgccttaacatctattaaatgaaagaagtctttcggagtcttggatatgtcgtccggtacttctacttggaactgattccacaggatacgtactttgttttcagacatgccgtagacaatgtacgtttcgttagcttcttcaaaatcaactgtacagaataacatatcctagccctcttacttgttgtagaactctgtagcgctatcccattttatgagactctcgacattggcttgatcccagatatttctggagttagtcaatgcagaaacatgcggctgaataagttcgaacttctcaaccgtggccccactagttagcagtaacgaggttaatgcttcgaatttaacggtatcgctaccggacagctcgcttactgctttaaccttgtcaattatagagatcattttagcttcttcacctacgaaggtaaagcgcaggttgcggaagcggaaggagatagccgctacactcggcttgctagagtccggggagtagttcggatggaacttgatctcggagactgattggtcagtcagataattggtgctcggattattcagggaatcgtatttcatctttaacctccaaaggttttatcaatttactggagttattataccaaataatggagtctccgtcaattgaaaatttgtgatagtatgctggcacggtgtaacttccataatccgtaactctagtaaccatgcggtgtctgcatttttggcaaccattgccttcaaggtgacttctagcagtttgcataaagtaatcttgatggtctggacaccatatctccaccagctgatttaggctgtgaaacactagcttctcgtatccgaagaatactccatgagcgtctagagcacggttaataaagatgaggttcttagcatcttgcctgaaatctggcctcagttgctttatcttattatgattgatcgaaccgtcgcgtttgaggaattgattaatggggaaggatttagcttcccatactagctcttgatttatcttctgtcttaattcttccactactcaaattcctttttcaacctctcatataggtctttggactgagtccaattaagatacactcgattaggttgattgcctcccccacgttgagtaagtataaaacactcttttctgaccttttcaacagtaactgctgcatggtccacgggattttctccccgaagatagttatctatagatttcatttaacctccttaaaccacgaaaggccagagcagttagccctggcctctttgttaggtaaacagatccagaaactcctctggataatcggaaggatctccaaagtcgatgtgatctgcgttaatcgggtagccttctttcgtcttgatgccctgaagaacatgggccaatacgtcaaagtctacgttgctgttgtcgcaacaggtagcccaggcttcctgacggtggacgcatttgccatccaccataacctcaacaccgtagccagtattccagcaaccgtattcacaatccccggaatcttcttccaggaagtttaccacaacgcgtttcttagccatttgtcaccctcttagtgaatagtgccgtcgatgccttccacatggatatcaattgccattttcagcatcgactccgatttatcgaactctttatttgaagctaggagtgcttcaccgcgagcttttccatactctgcaatagcgttcagtgtatgtttcaggatatcgtcggcggataagccctgagtttgccagtggacttgagctgtggcgatatttaccataaatttgctcagctcaacacgttcttcgtctaacgcctgcattacatgcgttttgcagttatagaaggagttcagacaaatatcttcttcggtcagaccttcaaccagaagcatcttctctacttgcgccaggcgatcaagccacggattttggagcatcaaatttttcacttgcatggtataagttcccgtcgttaattggtgcgaatgattttgcgttgcgttcaggacgctgtttagcaatccagcccagcatcatttgtcgaggtaggacaactgctgtattcagcagcacttcgtagatccagtagcgtgcgttctgatacttaccaaactcatacgctttcttgaacaagccccaaactacgctaagctctagcgtctctgcatttgcagtctgtcggaatggtatcactttggagccaatgagttctttcagagcggagttgatatcctgatggctgaacgtggtctcatggaactcgttgaagaaacgataatccagggcgttattagcgttgacaaacatctggatgaacagatcgctgaactcttggtgctcacgattaaaatattgatttaaaacttcagttgatgcggccatctttccacccgttaattgctacgagatacatctcgtaaatgaatacagtgactggttgaattgcttccatgtagaacgtcgccgggacgttatggaagactgaaaccaccatggagaggaacaatgcccagcctaggaaacggctggggagttctcgccagacctggaagttgcaatccaggaagttatagattcgaagctgattaagcattggtcagtctccagtaatagtgacgagtattaaactcgaaaggttcgtcggtgatcttagtgtgcagcgtgatgatatccggggagtaggactttgccagatctttgcgaaccatcacagtgttaaacggagcgccatcggcgcgctgaaccacaattgccaagcctaggggaggaagctcacacaaaggacgccatgagtccttttcagcaagctcaatcttggcgattagggcaattgactcaacgatatcttcgtcacaaagcaaatcgtggtctactacctgacgcagagcatctactaacacttggcgttctttggagttaagattcatttttcttccttcttaatggtgttttcaatatcatccagcaacgctgtgcagttatcgtagttaactttgcctcggccaaagattctcaaaacacaggcgtagtacccggttaacagaagtgccagaggatacagaggaaccagcattgctgacttgatagtaccttttaaaccgaagccgtggtacttcccggacaggtagccaacaactactaagtaaagtgctgctacaattggtgagatcattttttaatctccgtgatcaaccgcattttggttgtctttgacattgtggaatcctggccgattatctcttcgatcttcgctaggcgaactaggagtcgttcagccgcagcagagaattcatcagcgtctcgtacttgatccatcaacttttcgtggagtccgttattggtcaatctcattctgcggttagtttcccgcagtattgatacccaaaccgccagacccgttccagttacgagggctgctattaacagcccggagagaatttctagtaccattactttttcttcgccttttcacgtttcaggtcacgttcgaagctctcagcacgacgttcagcaacctgctggtgttctttggcccagcgcgcttcatttttagcgaggttgtaggccgcagcgtttttgttagtaccttcgtacagagcacgaagtgccgggagagacagtttggcaatctggccttcgaacccatccatatccagcaggattaccagtaccgcaaccatttcgtctttggtcagggtgttagcttgttcgtcagcagttttaccagtggtgtaagagatagtgttcttagccataatgatttccgtccgtttcgttaatttatgcgtatattataccgaaattctaactacttagcaagtgaatttttaaacttttttaccaatcgatccggtaagcgtaaacttcagaatgaatgtgctcttctaccagcttcttgacctctggccagttcttttgaatttcgtccagaacgtagtcgtttgaagcatcatcccactcctcaggaagtttcatgaaagagcctgcgtactccagtacgctctccagaacatcggtcaggtaaactatttccccgcggttgcagtaagcgtgttgataatcccggcgatcttcattaaatggggagtcgctgaggtaatctcccatatgaaggagttcatcggcgaactcctcaaatgccttgacacgagcagacagcggtatgctttcatcacgcatcagcaggttaaaagaagcacgggcggtgttaactgcgtggcgaagagattccatatttgcattcagttcgatcattgcgtttttcatatttgcttcctcatcaatttataaagctattatacagaaaaattggctcggaagcaactgaatttaaaatacaaatgctacgagcgcccagattccgcctacaattgctgcaccgactaacgcagctaggattaagaggccaataaacatcttggccatatcatttcccattccagtatacatggttactcctcacttaccagtcttctcatgtagtcgttccaccctgcacagaatggagaaatgccccggagtagttcagtggactggtgctgcttatagtggtcttctgcagccttagccccgcgtttcttctccgcccttttattaaactcttccagcacgatacgtccttctagagcttctttagcgataggatactccggccaatcctcctctagaacgaggtagttcgggaatcctaccttgccgtcagcctcccggcccttaaagataagtgataggctgtcgtttatctcccgaatagcagtgctggttagatacttggcggcatctgactgcttaaatacaatatagcgagattcgagtttcatgatttacctcaggcagtgaatagaatgtcgtccagtagatcgtccattgggcgatccttatggatctcccaaaattccttgggttcccaggtttcagtgtccggggcaatagtaaccgagatattcgcgtcgtctgtaaacacggagttgccgttgtccagcattgcgacacatttctgcaactcgaaaccaccagcaactacgaatacttcaccttcttccaaatctttgaaaagtttcatgtttcacctattaaataatgtcagcggaaccacatggatcatcacgatctgtggtgaatgtgtataattgacctagaaccggcgacgccacggtcatgcgaccgttaaaggtgccacctgtgtccagatagacacggttcttccagcgaatcgggaacggaacaccagtatggccatgaaacacgtagtctactcccacgatttcaggcacatcgactgcgcactcctcagagaagctggagtagcgatcgaagtacggatgcttctccccactacggtgcagattaaacccaacttcctggattacatcacgatcccacagcagtacacccaaacgatgtagaactggggcagattcatgttcgtgtacaatgtcgtcccacacaggtacagttacacccataccttgagccaggtagcgcagagggataccagcatgaactaccccgtaacgcttgccacgatgctcaactgtcatcatgtatggcattttgctatccatgtcctctgcgatgcctttgagggtgtccgtatcgaaaccttccgtgatagtccagctaccaccattatacatccagttggcatagtcgtcttggatcatgaactcgtcgtgattaccacgaacagagcggaatttcgggttgtacaggaacttcgctagaacctgtaagtttttcgggccacggtcgataagatcccctacacagaacacgtagtcacgaccttcttcataccctgcaagtttcagggcatccatcatcatatcgtactcgccatgaatatccccaatgaagaagatattaacattatcaggcacggtaactgtttcatgaacgttcattaatacctcgtctctaaatagtaacgttttggcagcgagaaatctgtgggctgctgcctgtgatctcttacatattcccctcgataagggtcgtatattacgtattgcactagaccttcgggttcccaggcaatcagtatttcattgcctacccgtttgaaggcatacccattctgcttagcccacagtatgcacgagtagtccaagctcctggcatctacctttataccagaaaagcccctctctacattgtaggtgataccctttattaacttatcgagctgtattttcttattatagtatgcagcagctcgatttttacgggccatatcagaagaccagtctctagagaatttttgcattatgcacactccacatcgtcgtgttcataaccatagttagtgcaggtgttagcttcgtcatcgtccttacagaacgcaacgtagcagtcaacaacttcccagaacgcttcgttgatcagagcattttggtgggttaggtctaactcatcccactcttcttcgctctggaagtctgtatgtacatgagcatcacagcctacagcgcctagagatacgacaataactaactcgtcctctaccatttccacgtaagcctctgcatactcccaggcggcttcgttaacaagctgattcttctgggcagcatcgagagcttgccactcttcttttgtgtaccccagatcaacgaaggtagtgccgaccgcaaaaccattattcaggataagatatgcttgcttagtcattatgtaatcctctctcaattcaatataaatattatatcaaaattttaagcgtttagcaaataataaaaaaccccggtctcgtattgagccggggttaggtattattcttctacgtagtcgataaagtcttggatagctttactaactaccgcagagcgaagtgaggcaccactcaagatatggtgtgcttcttcacgtccgttctccacatccactagaactactgcgggtacggtgcgaagaccgaatttacgtagggagtctacgtcgtccgtgcgtttttcaacgggcagattgaactcatcagtgagtttatcaaaaactggttcaaattgcttgcatggtacgcagctagaacctttaaggaatacgattttcttagacattattaatgctctccagtagtgttttcattgtttttacggttgcggtatccaggtctagcttttctccgaaagcctcaattatagcttcctgatacggctttttcagacgaccctcaggcactgctacttttttaacatccccagccttgacttttgccaaaatagtggttaaagttggcatagaaagtttttggccctcaatgttaacgccgagcagttcagttagcgcattgttaaggtcaattcgggtcattttcttaccgttggacataacaccctccgatttcttagcaattttcttaaactccggtgactcacgatcccgcagagctatatttaactcgtagggagctactttaaaatgctcgcacatctgagtgtagaatctgtccgacattttgtatctcctctctcgaatttataaatatattatacgctaaatcgagcagaaagtcaattgaatttttcattaatcgcagtacttgcctcgtcttacgaaaaatagtgtaatggggtagactgagtacatcaatacaggggaagtaagcgttagaattgacgttaccccaccagcgtacattagcggtataaatgctagcgttatagctaggactatcataccgaatagtaatgccaaggacaatgagaagcaattctctagacctaaccagagccagcaaaaccctgtccctctctttctctcacatgggcagcgaaacacaccaaaaataccaaatacgaagtgtagaagccatctagcaaccctagctaagcgtgttctgcgaaaataaatggcgccgcgtattaagatccatgttgcggaaaagaatactataccaaattgaaatatcttgagtagcattatagttactaaacttgcaaacataaccacctcctatttgcttgctccatacaaagaaggggagccgaagctccccttaatgtcacagtaactctacgtgtccaccatcgtaggtgccacgttggatttcgtcacgataatccccggagttgttccaatccgctccgaaacgaatggcgatgttcatttcatttgcggcctttttaaacgcaccgacaatagcccagaatgcttctaagtcgttccagtcaattttaccattgatatacggagcgaaatcaatggccttgcctgtaacgtgcttagacttgctagggtctttcaaaaatgaagtaccattagcaatgttctgggcactctgttgtacggtacgtttgccctgaatgatggtaaaatcgtgcggtgagagttccagagcacgaatagctagagccttgagtttaggatctacagtatcgagctgctggagactacggtttccaaatctgaaactcatattgatctccctagtgatctctgcggtgatgcgcagatttttgccatatagtcattaaacatacccatgtcttcgtcttgtaggggatacttctcccatgcgacggcaacatatccagcgtaaatgttattaaggttaaaatatgggcacgtgtacacatactcaaagtttgcactcttgaacggtggcaaacccgttccagaccacttcgataaaccttgtttattccttgcgtcgatcgcaaagtttagaccgtctaaatgcgctctgtagagcatagacgtcttgtcaactgctttgtcggatacgtcggacttatccaactgaacgttgctttcccaagctatgatagtttggtaatcatttatagcctcaggcttgtatttaaccacgaagacagcatcagctcgagtctgtgagaataggatcattgccttctctcgtgccacatttggaaactctagtgtgcgttgtattttaacatcttgtaggaccgccgaagtagagaaagtctttaagtacgacatgacttcactcgtattagctataaagaggtagataactagaccaaccagtaaggttagcaaacgtttaagaagagaagctggatccttcgcttcttgtagtaacagcgatatcaactgtataaatttatccattaagaacctcctctaaccatttataattataccctttattggaggaagttgcaataaaaatttatagttattgctcggatcatactttgagacaaatgtcaagtagaatttagataaagaaaaaggccagagctaaaaagccctggcctacttagttttattgacccgcagccttacgagcttcttgctctcggtgcgcagccatacgatctacacgttcgttgatctctttggaggtcagccaaatatccttaccaccctctatcatctcggtaatctcttctagagagaagaacgggtagtacaagtccagcatcatatcctcaaagaatgagttgaactgatcggcatagtgctggatctcatttttgcccttaccatagtgcgcaccacgataggtatggcccatcaacataacgtaagggtgtaccagccagccgtggcaggctaggaagattgagcaagcagctgatgctgatggcccaaccagatgcccaatcacagttccctggcagttcatgataaggttacacaactgaactgctgtatcaacgtacccgccgggactattaatataaagattaagagtgtctccctcttgcatagttgccagagtgactgataggtcgcggtagtagtctacatcgactatcggcccatcgaggtgatagtggtaaatattatactctgccttagtcgccaccagggaagcgaagtaattagtagtcttattgccacctttctgctctacgttattaatttgtcccatactgttaccttatataaagagaatcctctcgtcgcaaaacgcgtttacatttttacggaaattttccagtccgtcaaagttatttgtgaccacatcatcaataaactcaggtgcaacacctctagcagaggcatgagtagactgaatagcgtggatgttgttaggggcgtgaactttaagaatactagagttctgcgcaccggggaagttccgaactagcgcggcttcattatcaaaacgaacatcagaaataatactaatgtcagctttggtagcagtgatacgatctaccacaatatttaaccacaagttctcatccaccagagcgcgtcctaactccgtgccaacaaattccagcattttacgaggggacgtgtataatgggtacaacggggtctcgtgaccctgatagaagtcaggcgcagattttacaatcaacggatacagtgttgaagcctcaaactgaggccaaacgtaagggaaatcggcatacttgtcgataccaaaacgtttccagacgttggcagtacgttcgagggcttcctgagttacccaaaaccactgcttaacttcttttgtcctgcgctctgccagcttttctggcgtgactccaaggattacagccgcaagttcgtaaacgggagctgcaaaactgaatttactgatagaatactccggaccgaggacttcccaggcccaaaccttagccatgtcagcaaaggtgtctttgcctgcgccggcatcaccaactaatcctaaaacgtatttcattttgtttccttattgaatggtttgcaacgatattcattaagcgacacgcgataggtacacgttaatgcagtcagattggcaatataagtgtagacctgctcattacacttgcccattgtgatccaatcttggtaaggtatgcgaacatacactttaccttcttcgtttatgaactcaaaattaaacgggcaagtctgtaggcttgctggccacggtaggtgttgcggctctatccccgttactgagctacttgggtctggccgttctgcacacccggatgcgataattgcagccgagagcaggagtccatatttccagttacgcatgaaagtctctcctggaactcattaactttgtcttttgctactttggtagcaagtttaggtttagcggcaaccacaccctcttttgccctagctgcatccagtttattaatacgtccatccaggtcttcctggttcttggctaggttggttatataggtagtagtgttgcgatctcgatttcgaatctctgtttggagattaccaactgtcttttctagttgttcattacggtttgatagggactgtaaagaactggacatatctgttaacttattggtaatgtagtaggcaccaccgaaggtgcctgctgcaattgccagaaacagaattgctccagtcttaccgctccatattcctgaaagaaactttagcatcgaagcccttagcaattaaccgatcacgatcagacgtagattcggtctttggttccccttgacccagcacaccgaagatatatgattctagggtctggtgccagcgatacaggtttggatcaatttcctgccacgggaaatcttccgcatggaagttgaaatcagttttaacggtaatgttaaccgttgggtctgtcttagactttgcagcatcccatgccatcgcaatgggcttgttgaaagtctccaggaacgcagaagccgtggcggttgcgttacgaacgtaagcatcaatcttttcaatcgtattggtttcccaacccaaacggacggataagccctcttcttccatcagttcgataactttggcaggctcgaaggtttggaagtgatagccagtccaagtgttaccaccgttagggcggtatgtatgatacccgtatagccaacgcaaagtaccgcaaatcagaaccggacgaatctctagggttcccacctggtagaccccaaacttaccgttcttcacagtctcaaacagattagcatagaaaatgatctgttcgaaatctgccggtacgttcacaacctgcttaatttcttcccggtgccaaacgcgttctgcgtcgtacatggtgccctgcaggtcatatacatctttaactttagagataatacgcatctttgttctcctctcatttataaaaccattatacaacattttaagcgagagtgcaagtaatttttaaaaaagaaaagcccaacacctttcgatgtcgggcttgggtagttagcgatttaacgggtggtgttcctcacagtaatcgttaaagatcttggctcgcttgatactatccggtttatacttagcgaacgggcctttcaacgctccctgtatgatgaagatggccttacacagtctgccgatggtcttgcgactcatacagcggagctctgcagcatgcttaccgttacgaagctctaggatcttatcgaaggacttcaggacactcgatgcatctttggcaccgccttttgcgatgatggcctcgatatctttacgggtggcaaacttagccaggaactcgaaggctttagctgacagcagcttagcagagtccagaccatgattgataccaaccgccatccacgctgatactgccagtataaataaagtaaacattttgcttcctcagtttgtctttgaattagttaatggtcagcgaccaactcaccacttagttcatcgcgggcacgactccggataggaacaggaaggtgactcctataacggccctaccgttatacgtgtggattcatgttacacatcatccgagtcttctctacttcccgtcgtgctttgcgacgttgccgtcgtagtttgtactcattttcaataaccttatggaaatggtcattgatgttatcttctggcaacatcaaacgaattgttgccaattgctcgatctgaacccgaaggtgggagttaggcatacaaagctcttgcatctccacgaacccggataaccctagagcggtcatagaggctttagcgtatactttgtcctcttttagacttagctcaacggttatccggtagcgagagtcaaacacagtacaccactccgagggtactgccccggctcttgcccagactgaataaggggcttcctcaaaagcgcactcttcattaatccaatctagggtctcttgaagtttggggtgaagattactcatcgctatcatcctcgtcttctacctgacgaccatagcggtccagtgtcacagcgggcttgccataggttttgttcgtgtagatcttagtttccccaaaacgggtttcagatttacgaaacttaccagcttctttagtaatcccattcgttgttacacgaacccgcccgttatcagagatctctactttgttacgctctgcggccagagatactccagagtacatcatactgaatacgatgattgctgcaattgaacgcttactcatagtcttcaccttcgttatcttgttcgtcaacttcaccttcgaggtctggctcacagtcccggcagatttcctctatttggttctccgccctttcaaaagcaggacaccaccacccacaattcacgcaccgaaagatctccatatcttccgcggtctgccagaagagatcctcgataacaccttcgtgaaggttatacccgttagccgccagctcttcttcgataacattgagagcttcagtttcgcttacacaggaaccttgtacatacccgtgcattaacgggcggataatgctttcaatacttagtttgctcatgaagctctccctattaatttatgtaactattatatcgaaaaatcgcctacagtgcaactgaatttttcaatactttggcttcggcacgctttcttttgtactcggcagctcccttttcgagttccgaattaaggtagtcaaccatggtatcccacttgcgatttatccagtggcgagtaccataatgcgagaacacctgtacggtatagtctaccgggctggcgtctttgacgctataccaggcctcaggactaaactgcttgaggtcgtccagctggggagtaggcatatccagagctttttgatggtacagttttgtcaggtcaaatactttctgctggtaacgttcatggtcacgatagtatccagagagtcgctctactagtgattgggctgcttccagattacgagaggttacaacgcaaatacgatccggcaacccttgctccatgaactcatgtactacacaatatccgagatccatattaacagctccagctacacttaggacacgggcaggacagtgcgtgtacgcacatcttgccgtttttatcaacaccagtaccatgacacttggtacaggcagcatgtaaacacactggtcgttgctcctcgactaactttttaataaacggagttctttcaaccattttgcataattcttcgtgagaatatccaagacctgtactaatcattttctacctctgcgtttcggagtgggccaggaattagtcttgccgtgagtaacctcctggcgggagctacgtggcataaagttattaccaataggatgttcgtgttccatttcccgagcgtaggactctaattctagaaagctggcttgggactctcgttccattctttctagatcagtgaagctgggaaatccgccgattccgccgtagccaataagcattattttcggcacttcgacattacgttcttccagtcgtttacgaacaagttctattgcttcccgggcaattttatcgtccattgcgttcctccttcggtaaataatcatgaagctctacataagagatgttctttctttctttatactctggcttaccatacataccatgcacttctactactttggcgcgacgaggattattaaacataacattccccggtatgactactacatcacctatctccggggagtatttccaataactaggtactcggtaaacgtaagttctgttactgttggaaaacttaattccaacgtggcgagtagttgaagccatgatataaagccttagccgcctgccgcggcatgttaagtttttcagccagttcagaccagaagtctttaccgcttaccatgttatatgctacgatgttcccatcgaaatctttaagacgctcggcctctgcctctaaagctggtcggttcttttcaacttcgagctggaactcattcagacgcatgaagttacttttgtcgcctagaaaacggacgtaggctccggcaacaccatctaccgaagatgcaccgcatttacaggtctgcattttgtggtcgaccaattccagggtgtcacggcagcattttacgaaatatacaactttactcataatcattatatccttcaactgtaaaccagcgtttaacttgtgtgaagctcacccaaataccctcatttgcgtcgctccgtactttgtaccctgctctactatcatgtagttcaacgaagtagagcttacctggagtgaagtattgaaacttgtgaccaccaacaattttatactggaggccaactccaggagtgaagcgtaagagactagctttcaccatgtttcttctccaggcgtttttcacgcagttcggcttttctcttagctacacgttcccgcagtgtaccgtgttccttctcataacgcaggtgatgcctgttgaaatcacgcttcatgcgaacgttataccagtattcttgactagcaatgaagatcgccgggcgggacagtctaggaacatcgtacagctcgaacatacgagccatttctttatactcggcatggttcataacacgatcgcctggggcaatctgattatcccaaacccacttttcgtgatcccaatccgtatagaacgctcggatagtgccaggagttacctcgatttcataccacgctgtcttagatacacgatcgtgatacagacctgggcgattaaataccggattacgttctttttctcgccagttatggaacgtaccgtctagtgcttgctccacactgcgtcgtgttgctttgccccagatgtagaaagagtcaacaaggctagaacgaaagactcggataccccgtagagattgcttattcattatttgatccccaatgcgagaagatgattagacagcctatcaagtgcttccagagcagctttgttgttttctctcaggttgctaatagtcgtctggaggctatcaataacaaagtcacggactgctaactctgctgcgattgcggacttactattaagtccttccgcggtcattgcgttgacatgtcgggtataataaccgccagcgaaatccagttcgtcaatagcacgttcggcgtaatgcaattcattcagttcattgagttcgttcattgattactccttatccatcatttcgaggcgttctttgacgtataccagcctgttgtgttgttctttagctaactctgctaatctgtagatatccgccactaactgcattgtatggtcgtccataccttcgggtgggagtgtatctgcatatgcagtacagatagcgataaactcttctgtgttttccattgttactttcatgttggaaacctctctcatcaatttataaatctattatacggcaaaattggcatttttgcaagtgaatttataaagaaaaagcccctcgctcaaagagacaaggggcttttgtttagaggtcaggaggtgcctcagtgttcttttctggttgttgacgatatttaaccgggatcatatcatatagcatttcaatcgatgcaaatgtgaacggtacccgcacattagatggtgtagtcagtatcagcagttgacgcttttcatcgatttctatacagttagacatcttgacgatcctcttctaaggatttttgtgctctcagaacaatctggtttatttgctccagagagtcgaaggaaagttgcaggccatgaccttcatcggtggcctgtatgaataaaactctcttagaggcgtctacgaagacttgaaattcttgttccactttactctccaaaaataattacaggacactggttttctctggctatacgagccacgtaactgtttacgctatgcttaatagccaagctaggctcgtcaaacatgacgcagctgaatcgacgacctatgcgataggtttctagcatgctatacgttgtaattttaacgtgaggttgaagctcattatacttcttctctaagcgtgccatttcccggacaccggatgctacatatactgcttgaatacccttaaatactgcaaactcatatgctgtattaatagcctcaaacgtcttgccagtagctcgtcccggattgactgatagaggccaacgaaggtcaagttctaggaacctgaacagttggttgcgatctatgtacatgctggctccttaaaccaaactatacgaaaacctgtctcgtcctccagagcctgtacaatttgttccagtgtcagaaccttatcggacgagaatgtccagagaaactgttggagttcattccaagactcggcctccataatcggaacaccgatttcctggccgaaataattatcagtaccacgaacgtcaatacgaccaccggcataccgtttatcaaacactttgcgagttagttgcccgccatctgcaaaacgattaggctcggttacttccgtatacggaatgcccatacgaatgtaccaattgttggagatcggccccataaaattggtgctataagtgatcatgatcacccctttaaattggcaaaccccaggagactcgaactcctactgcacggttttggagaccggcgtgctgtccagtaacactcggggaatagaattagctaccgtggtagacagatactgtcttaccattctgattcataacgtaggctacctcatcttctttcaggaagatatgctgatcaagaccagcaatagagatgctcttctgcttaggattaaacccaacgcttgaaccatcgtgaatttcttcgccaccgttaggtgacattactttaactgttaacatttgcttctcctatagtttgccatctctggctgttaagtgacgtcctaactattatagagtcgagttccaggcagacgtcggcaccccggactacattggctctagaacagcaaataatttaagagctaaacatactaagacgcagcgcacgtacacgatctacgcaggcttccatctcagctaggagcgagaacactagctctgcatcaaaggttttcattgttgtacctctcaagtagtatcgataaaatggccttaccggctcccagttccttgtttaattccccgaaacgtcaggggacggtcattttaccgaatttggagcgactagggggaatcgaaccccactcagtaccgcttggaaggcggacgctgtaacccgtacagttagtcgcagaaatggtgccccttgatggaatcgaaccaccgaaggctgcttacaaggcagctgttataccacttaactaaagaggcgaaattggtctccccggtaggatttgaacctacgacccgatgcatccaaggcacccacgctgaccaggctgcgctacggagagttatctgtaaactgcaagttctttcatcttacggatgattaattctttaggagcggaaatccactcattggagcgttcaaaactatccagcaccaatttttcatctcgtctacgatcgaagctaaagaagtaaaactccagggtgtaatctcgtgcaggagagtacgtctggtaagaatttaatcgatctattacgtcaatagcggaacctactttaaaactgtcccaggcagggttagatactaagtaaacatacccggcattcagccccttagcctgattttccttatggtaaaactttagtaggtctctagccacaatttggcagaaatgttttgtatttctacggtatgaactagaacctttcacatgggaggtagtacggaagtactctttattcgtaatattctctactatgaatagtacgttttcctcggtaatatccggagttataaaccccgcatcaataagctcttttagcttattggactcccctttaccatgcttcatatttctaaccctataaaattggatacgggagtaggactcgaacctaccatcacctgtgcggaattacgagaccatttatttacggaatcgaaccgtatctcaacccaagccaggccggcttccccatcagtcgtgccccgtaatttggtacccactcccggactcgaaccgggaaccctgaagtcttaagcctcatgcctctaccagattggaccaagtgggtgttgtttgttaccgaatctccagaccttggaagtagcgagggaacggagagcctacttcaaagctgatgccccagttgagttccactagctctgacttatccaaaagcagatcattgccttcaaagatgtagccgtatacagttgggaacatcgctgctagatcttccatattggagtaagcattatgctcttcacggaattgctcaaactcttcaaagaacttctcaaggaagaactctggtacaatgaacgttacaacatcagtgctgtcatcaatacgatagaccgttgcctggaataagccgacaccgaccaagttgatagcaggagtagtaaagatatccattattaatataccttgattaaagtattgtcgatggtgttcaggaacttaactgccgcatctctattagagaatgtctccagcacgataatgttgttctcaggatcaccgttacgcactcgtatctggtacgatacaatcacttcccagcggaaccataaagctcgtggattatatcgcataagaattttttggttcattaggtaagccctctcattaatttatacaattattatattataaataagagcgtttagcaaatgaatttttcgaactttcgggaaaatgccaccctaagtcaatgccactacttgagacgttataggcaatctatctcaagttgtctgccccattgctttcagtgatttctgcacgcagaaattcttcttgactggaggactttaccacgtcaaacggccggaaatcggtggcttattttatcctgtcacccatcaccggcttgtctgagtttaatcagagagtctgtaacgggctacttgggatttggaagtatcagttggattcgaaccaacgcaccggctaacctagagatcaccagacgtttccaagtctgctcactaacggccagctgctttaccgtgagctttaggactattcagctccataagctattgatactattaatttggtgcaaccggttcgatttgaacgaacgacccctggactttcaaaccagtgctctcaccccgctgagctacagttgcgtaattcatgcctgctcctttgaatcaagaagtccaccccggtctttgggtctttgcagtacatcacgctgctctgatgtttggtggaacttgggggactacgtgttactcccctcacagaccgggattccccgctatccatgatgcttaaccgattagctgaagtcccatagtgtggtagaccgcccgggactcgaacccggaacctatcgcttaaaaggcgagtgctctaaccattgagctagcgatctataattggagcaccatcatggattttaaccatgcttcgagggtttgcaagcctctgcctagtcactcggccaatgatgcattgtttaattagggcgcaccggagttccaccgattgctaacgcttcactgcaacctaagtcgctgttcttaccctaaattggcgggagaggtgagattcgaactcactgtcattcgcttaacaggcgaccgcctataccacttactgcttctctcccaaatagatttaacaaccaaagcgcttttgtccatttaagctacaaggcctttatgccgcctgttgcgtacgcgggattcgaacccggatctctttggttgtcaaaattggtgggggaagatggagtcgaaccacccgagccgcaatggcaacgattttacagaccgctctgctaccacttacagaatattcccccgtatttgaagaagctctcgtgagaacctcttcaaatacctcgtcgaaacgagatatttgctaacttattgtgactagggctgacccttgtgtccgaggatacctctagacggtcatttctcttagcccagagagaaactagctttgggtgtttcggggttactccttctcggctctactgttaacccttattcgaactacataccgagttatgagcgtactcactagtttaaattggcgcggctaacgggattcgaacccgtggctccgacgtgacaggccggtatgttgaccgctgaacaccatagccgcttaatttgttattccggttcgtactccatcagatcgtctgactcacatgtcgggcactcccaatggcattcacttaactcaccgcaatcggaacaaatgtacatttttacttcgttttccatttgcttttcctctttcgtttcaatataaatattatactaaatttcagagtactaggcaaatgaatttttcattaatcgtcttcttcgtcccatgagagggagtgcatgaagatcggtagaactgtaggttctacgtcaagagacgggtagaagtaagttttaccttgagacaggtcaatgaacgtaggagttctgccctcctgcatgtgctcatcaaccttgtctagggcgtcgtttaacagttcgaagcagtcagtattcgctccgcaaacaacgataaaatccattaacgacccccattcgggaaaccggaggcaagcaggaagcgaacaacgtcttccagcgacgggccttctccatcctcttcttccagatggaaaggcaggatagcgtactgcatgtcagctggtgctaccggggtgaaggtaggctctgctggagcttccgccataaatactgcggttccgtcaaccaggcggtcgatagcttcgcaaacctctagctgttcttcgattttggcctcgcgttcgcgcatcagagccagcagttcagtgcggtactcttcgatacggcgatctagagactcgatgttattggacaggttatcctgtacaatcatcaggcggactacagcagaatttccattagttggtcgtgtaaacatgatatttcctcagttaattgttaaataaagtcaccggtagaaactaccagtttaatgcttttacggaagatttccttgtgatcgccttcggctcgatgcaccataatggtgccaaccagtttgttaatctcaatttctacatctatgataccgtagggcatagcatgctcatcggtaagcctagtccatagttctggctgaagcgtacagctataaaagaccatccattagtgatctccgtcccatccggcccaatcaaccaccagtgcagattcaataccagttgcagtaatcttttccatttgctaactcctctcattaatttatgaatctattatagcaattataagagcgtttagcaaatgaattttttgaattatccgctccgaagagcggtaatccaggcttgcagttgttagttacacttggtttgaagtttgcgagtcaaagcgaaaggggatctattccttacggacgaaagagttccaagcgctgagagctttcagggactgaaggttgatagcctccccgtttctgcaactaacaaatcttaacttgaacgtttaacgtggggattgattagccccactacacgctaaccccggaagggatcgaaccttcacaagatagaccatttatctcagcctcgttttcgggtatcttatgcagagtggatgttctgcttacgccctttaggaagccccgtataccgattccggcacggcatcaacgcgctagggcaatgaccgtctaagtccctagattcgccatttatactcctggacggcatggagtcgattccttagacttttactcagcattgcgctaaaacctgtaaaggtaaggatggggtattcttacgaatctgggatcatccccatcagaaattacagcttctcggacgtttgacggccctgaccgaagtctcactgtaaattggtacttgctgctggtttcgaaccagctaccctcgccgtgtaaagacgatgctctcccgattgagctaagcaagtatttggtggtcaatagtggactcgaaccactgtagtctcacgtatgaagcgagtgcataaaccatctctgccaactgaccttatttggtactccgaactggactcgaaccagtgacctaacgattatcggtcgtttgctctaccaactgagctatcagagcattattgttcctgctggcggacgcagatttcctcgtccgggtgtattttagcgatcctagcgtcttcctcggcttcattgtaggtgtcgtgaaaagccggtgccaagaatacaatctcttttgtgtgggtattaattagcataccttgatagcgagtcatagttacctcaacgtttaccattacgaggtgctccgggacgtttagcagcttctgccattcgtttcttgattttagcgatattctcgggtgtttgttctgacttacgtaagcctgtcacgttacaccagctatcaccttcccaagaagtgattagcattactccagtacctagtactcgttctgtgaaagagattttcatcatcttctcctagaattggatgctccggcaagattcgaacttgcgatctccagcttatgagactggcgaggacggcctctcctctacggtgcaattggcaggggcaacaagaatcgaacttgtgacctaaggcttcagagacctccgctctacctactgagctataccccaattatgcgcactctgctgagtacaacgttgtgtctagggccagaacataaatgcttgcatttatgggaagcggctagaagagggatgtgacccggagggctaacctcgtcactctcagcagagattttatggtacaccatcgaggaatcgaacctcaaccatagagttcgtagctctatattctatccattaaactaatggtgcagtaatctggagggatatcttggattcgaaccaagatagactcgatccacaatcgaggtcattatccagttatgataatatcccaaatttgagtaccatcgagggctgatcagacctccacaaataaaatgcacatcgcacaccgtatttggttagaccgcgtactgggcataggacactcagtgtactacgtagtcccagcgtacgactcctataatatcaatgatactcaaatttggtggccctaagaaactcttcccactcacaactagttgattacttctggattttcgcccagaaaattctctagaaaggggcaaccgttactcgtcgggccattgtttggcggaaagcgaaggacttgaaccttcatgcccttgcggactcatcattagcagtgatgcgtggctaccgtttcaccagctttccagttgtttggcggagaataaaggaatcgaaccctcaccgtttccgatggcgactgatttcaagtcagcttgctcccatgagcactactctccagttaatataagatgatgcctcgactacaccgggctgtttaagccccgccaggattcgaacctgttaaaacagtgtttccaccagccgtaggtttcactgaacatcaaatttggtagggatggagggggtcgaacccacacggatatttcaccactagaacctaaatctagcgcggctgccaatttcgccacatccccatttgtttggtggaggataacggatttgaaccgttctgattcccgcattgcaagtgcggtgtccactcccagcagacccatcccccaataatttgttaaggcaattaatccggtgcgcgtaataccctgagcaattagccatgcaaggatacccgctcttcacaaatacgatacactctacgcttaccaggcgtttcggagagccactccgctattcttgcaaaccctcagttcaattaccgagcaagctgcaagcgtgttttttggttccggctctgtatcagattaattccttaacaaactatataaatattatatcaatttgttaagcatttagcaactgaatttttcagtaaatttggtactcccgacggggttcgaacccgtgttcccactgtgaaagagtggtgtcctaaccagcttagacgacaggagcattttaaatttggcaagggaaggaggagttgaacctaccgatctcggagtcaaaggccgatgccgtaaccacttggctattccctttcaatataaatattatctcaaattctaaagcatttagcaattgaatttttcaagtattttggtagtgacccggcaacgcaggtcactatgcaaactactcgccgtggtctacacgaatgagcggacaaagtttgtccttcttgtagattcgcatcttttggtagatgttaccgaagcgaagctcttcatcgcgagcattatactctttctgtgctctttcaaaggatttactagcgttccattcctggatccgatcccctatcttagcgcaggccccgccgatcccagctatcgccagcagaatcgctactatcgtagatagtcctgctagacttaaccctacaagcatgtaccagggagtaattcccagctcaaaggtgaggcccaagaacgtagataagatacttcccatccccaaggagaagagtacagcaatagcagttacgccaatctgtagcaggaaataccacactgagtgccaaaataggctacacaaggtgactctgttgtcgttcagccgataggtgaaagacgcggaagagaaattaagccacttgtagaaaaaacctttacgtttaatattcagcatatttagcctattacttgagttgattgattaggaaaacttgtagcgcgataatgaatgcggcataggagtcagagcctttaccaccttcgttctcattaacttcttttagtagggcttcaaaagctgctttgtgacgctcatagtgccctctgactgtcgggccagcatcctctaacatgcctaaaagcatatagtactgggtttgtaattgggcgtccattagtcctcccacacgattttaatcgagagaagacgatttacaggaatgaccagcatagtctcagaccgtttattaagaatttccaggatatccccatcacgatggagcagacgtttaggactgatatctgttactgtggactctaggacgataccactgtcatccacgaaggatacgattgcgtttttagtagacattttagtctcctgttatgaaattggtggctcccggaggattcgaacctgcctaccttccgcttatgaggcgggtgctcatacccaatgagcttgagaacctgagaagggctatttctagcccttagttatttatactgctgcttcatcttccggggtgccttccaccggaggttcttcagtaggggtatcctctaccggagtgtcttcagttggagcatcttcaaccggctcaggatctttcacgaagcctgcttcttcatcggagatcacatacagatcctgaatatcctctgtattgatcatacgagctacgctaccgtctttatagaatacggatttagtaccctcgttgcgagccatgttcgcatcgataaccagctcagtaagaacccctttctttaaatattcaattttgtaagccattttatcctctactttctctttgatttaaagaactattatacaaaatttctgacaaaattgcaagaaaaattttgtagaatcaatctcagtctgcgccctgcgggctttttaccgctgcccactgaatattacgtgtgggcagcgattaaagtggtactccctacaggattcgaacctgtgacccacggtttagaagaccgttgctctatcctctgagctaaggaagcattaataaagtttaagtgttttgacaaccagatcatgaacctgttcagaataccggccaacgctcttatgcagcgactccttaaattctagagtacgtctagcgattagctgcttctgttcaggtgtcagattcggtggtggacgttcataaggtggtgtacgcatgttggtctcctaagtatctttaagaactctcgtgaaagctcttaaagataccgccagtaggtaggggccttcccctgtttaagctatgcggcccttctgtcagacgtatcttccagttatagtcaaggtgactaatataccttgccagatcccggccaacggatatccgtcggctaatgcggtctaggcgagggcacactccaaacaggggcacttctagcctgtgtaagggtgctataaatagtggttatgctttcgctcggggtgactccggtcatgactccattgtcacatgcttacacagggtatacgagcttccgcggagctgtatactcaaccgtgtcccacttaggtctcggagccaccgtttgtacgaacggctatccgaatactctttcccacttagaatcaggcgagatcccacctcgccaaagttcatacgatcatcatgccgtatttaaggactagttttggcacttctggagagccatcttccacgcggtctgttaaaatcacacctccgaattttcgatgtgaagtttggctatctctagccttccagcgtatggtcgcttcgcacctgccactcttacgttcaaatcggtttaggtggtggcaaccctccgaagttccgagtttggttgaggccgtcaggtttcctcgtggtttagctgtttcgttcccgcgagtctcccaagtctttccctgggaggggaggaggtactccagcagcgagtggttcgccaatagaaccatcagttatctagctctttccgaccgcaggattcgaacctgcactttccgcatctggggatagccccccgcgtgcagaagtctaccaattaacttaggacggcagtgttgctacataagtgatttcgacaccccactatggtggcaataaccagcaccagacgctatacacatgtctccaatttgcagcctaggcaggtcagtgtgggagctatacgagtttctcaggctcagctccccacctctccggcaggccacgcaccatgcttcattctggtcgaacaagttaaagtgagattccaccattttctataaatcaggagaagagtttacgagactacgggacagctcccgagttttacaagagatctctaacctacgcccgtccaatacgctccctggccggtatccggactggatgcacgaactttgtcaggtgatcactcttaactcaccgattctattcaacgaatcttaatgctcgacgagtcttacattaaaacaagttcagcgtaatcggcccgctgttctctctaatttatgaaactattatatcaactttttaagcattaggcaactgagattttaatttatagaacacatggttgccaattttacttgttcttttgaagtccttgtcttttgtccagtaaggtttagtatctttactgtgaaagtacaaagctcccttcgtcggatctactggaagatccatatagtaaactagtctagctatctctttagcttgtttccactcttcgtctttacgatcgagtttatgtttctttttaccaacccagctgaactgccctggttgatagactactttacaatatgtggacgggaattttccatagttaacacgatttttcgttacttgtgcaactgcggtcattcctttaactccttcccctctagcttcaaagtacacatttttagctatgcactctatctcatgcgcatcaatctttgcctgcgcatgaaggctagtgaggatggagatcattagaatggctgctttcattatttctcctttactctttgattcaagaataatagtatatcaagaaatcagccatttagtcaaatcaaattttcaatttcgattcgatagttttaatacagtacgcttctaccagggcgtcaaacaccggatcatgtttcgacggatagaccccctcaggaatcaggttgtaacgctcgattacgtcgtgtgcgtagatttcagcacaacgtaccaatgctttccagtctcctccgagagcctcgaaatagtcacgcgggttacgggcgctagagatatcccagaatttccacggaacgattgcaggatcagacggagagaagacattagcctgagccgccactgtttcgtaaatagacatatcgaactgtgggccgttgccatagtggcacagagaacgagtgtcgatgccctgttcgtcgataatgccttcgattacctgtttagcctctacgaatgggcaaatcaggtccatgaacgtatgcttggatacaggtgattcatgggtcggattgcaaactagaacggtagactcaccgtctttagcgttcagggcttcaataatggacagtgacggagcactaccagcacgggcctcattcatccagaatgcaatagttccggcggacactttagcacctagggccaactgctgggcaatgttcggggtgcctaaaacgatatacggatctagcgatagatctttcatcagtacgaaagcgaaagacggcatagcgataaaggtgctcttgcaatctcccggagttcccagagattcgatatcgcaaacagagatccagcggtcttgtaagttttgcatattgtttcctttgttattaaagttgcttctagatgtgttaccacatttagaagccacctccggtggtggcttagtcatatcttcggacacatcccagttttcttccatagacggccagtcagccgcccaatcttcgagttcttcgtagcacgaatccatcagttcccgggagttgaccctagagtaatctagggccgacttatgtgtcgctgcacgattgaaatcgtttttagctacaaaatttcgcattatgccttcttagcgggtttgcgtttttgattacgaggcttgtttgccttgcccgtaaatttaatacctacgccgtaacacagggcgcgaacattctcacggctgtactcgcagccaaagatattcggcttgacgctaccgaaacggccctgggtcttgcgcaggacttctttggtgtccgccttatccggcgtactccagccaacgatcttcgagacgtagccagaggtagaacccttagttaccggctttttacgacgcggggccggtttgcttacagctgatgctgcttgagtatcagtcggatgtttacgcagatgacgctccagacgtgctttgcgattcgcttcagttttgggaaaagttgcaactttggtttctactgcttttttagaggtctgcttagccatgatttatttcctttgttttgattggtttcgttaatttatgaatctattatacgttactttttagcgtttagcaactgcgttttttcattttcatctacaagctcatcgaagatgatgaactcgtacctgttaccgcccgatgtgcttcgcctgctcttccgagctgatgtactggtacccgcctttgttgtacgctggggcggtacagagtttctttcgctcaatttctttaagagcggctcgttctctttcagccatctcaggatccaggatttcccgtgcctgcggtcttggtggtagacgcgtagagggttccccgattttgacgcttccagaaacgcggcgtagagatcgagctggtactgtggtacgtttgggaacaaatccctcaaatctggtgccattataattcatctccacccctcagagctttccactccgcttcaaagatttgggcttccatacgtgcgattcgcagtttcattactactcgatccacaccaggctccatcaggagcacctcatatttcatttcgctaactaagcggcgtaaattctccaacatcacatatcctccatttccagttcggtcatgcgaacatttagcaggttatctgcagcctcattgccttctacaccagagtggcccttaaccttaacgaaagttgggatctcattgtggtttagacgatacttcttgagttcgtcgataatccacttccactggtctaagttcagaggtgtatcaccgtctgccttcttccagcctttacgttcccaaccccaaacccaggactcacaaccattcttaacgtaggtcgagtccagatagattgtcattggtcggccagggtttttgttagaccatagcagagcctctaggactgcttgaagctccatctcgttgttagttgtgttgcgtttgggagcagacttggtgccgatttgctcttcgctggagttgtaaactaccatagcccaagcaccaacgttgtctacaccacgagtattaccgcggcaaccaccatcagtataaacgtgaaacattatgcgttctcccagctaatagtgatgtagtcagtatctctctggtcgaaagcctgatttacccgtacctcgtacccagactgctctagatcaaggattatttgacgacgcggggcaactgctatgccgtttagtgcataggagtccacttctgtcttaccggaagtagcggcgccatcgatagcggagataatagctcttcgagctgaagtcactgctatatcatttgcccgtttggctttagctgccattgcttttgcatcagtaaaagacatattcatttcctctctcaaatttatgaatctattatattaaaaattcacgtggtttgcaaatgaatttttaatataagtggcccgaaggccaccttagttatagtaatttagctggaggaactagtaaattactgttatagtcccgcttggctggagggttttctttaggcggtttaggggcaaactgacgcattagtgcgtccatgcccttgtactttaccatccctaggataacatctatgtgtaaccccgaggattgaaccagaaacttcagctgagactccccctttcggagaaggttattttggggcgtctgttaaataatcccataagtcctcacgcagtgaacggataggcaatagggtcatgagacttgtaacccacgattttaaagtcgtccttagaaacccaggtgagtacgtcctctagggttttgatttctgggttgatctctagacgaggggccgggaaaggcttgcgatcgaattggccatgttccatgagaaccttgtactgattctcgtagatgtgcatatttactatacgttggtttgctcggattgcccggttcccggtgatctgggccataagcgcaagaaacgtgtagcattggaccatgttaaaggcttgtcccagtaggaagtcattggatctctggaaggagtcgagatacagatttccattgagtagcgagaactggtgggtatgcatgcacggtcgtaagcatccttgatcaaattctccagggttccagaaggtgagaatctctccacggtcatcaatgcctcgtcgtaaattctcatagatcttatagagttggtcaaagtgggaaccatccggtcgaagccacgttctgccctgtactccatagactctgcccatatcgtcggttccctttctgttagggttgaccaaccacgcctcgttttcgttggcgttagcgttccacgtattgcagccgatagcacggaattgctctgcggaatcatatcctcgcagatatccgataagttccatgatggcctgaagggcgtatgctttgcgagtcgtgataagtgggaatttctttccgagtacatcatattcaaagtttgaccctattacggttaaacaacgaacccccgttcgagggttctccagccagacaccttcttcgagaatgcgtttgccttcattaatatagtgaatcacagatagactccttccataacaaaacgatagcgctcattttcccctgaagctatatgggttactacagcatccggaggagtggacgtaagtatcgggtgctccaagtatatgatgcggtctaggcttggtaccgttccagtcttaggataaatggtggagcgataaatcgcatccaggcagcccatagttgctagggtttctagcagggctttccctccgatgcagactacctcgacttcgtcacagaagttccgaattttggaacccaagtgggtaataaaccgcacattacgaggagggttttttatcagaattggggataccgaacctactacgtacaccatagattttttctccagtgcctttttcagtcgaggaggggccgttgtgtaggtattatggcccacgataacaacctgataggtatccaggattttgtagaactgctcaagctcctcggggatggagccccagggaagttccccgtaggcatccatcgtaacaggattaaaagtaccgaaggcggcgtctactctcattgcgtataaagcggtaatcattacaggaactctccaaattcgtcagacagatcgtccgggttagcctgagaggttgcaccaacacgatagttggtaatctgtgcttcttgcggagctacttgctggttcttggtgttcagccaacctttcatccagccaatcgggtcttccataattaccgggagatcttccggccacggaatgttaatcgccataaatgccaggcgtgcgttgtaatacaggtactctaccagtaggtcggcattaagacctggaatatcttcgccctctgggaagatgtagtgtgcccagttgatttcggtttccagaatgctgcgcaggatcttcggagcgttagcctgagctgctgccactacatgtggaggaatttccccattttgaagaatacggagaacttccatggccataacggtatggagtgcctcatctttagcgatcagctgtaaattcttcgcaatacccgttaggatatcgttttctgccagagcaaaggtacacgcaaatgatgcgtagaacataatagcttctagagcgtatacggcatagtagaactctaagatcttctgctgtacctgttcagtcagcttatggaagtctgcttcttcggtgtactccagagtaccttccctctcagcgatttccagattggctctagcgtccaaccaaatgtcggcaatttcggccagctcatcaataacagaaaccggcagtgctagacgtgcgaatgcttcgtcgttagcctgtacggttgcaatgaactcccccggattagggagaacgttacgaataatgttggaatacgcacggctatgaatattctcaaagtagctccactgaataagcataccttccagttcggggcgagataccagtttcagaatggcatcttccggagcacgggtgataatggagtcggcttgggtttgccaggctaagttcagcagggttttgtctttaatgtgctgcggcaggttaggccattgtttcttatcggcttccagggagatctcagtctcaacccagaactgcgagcgttgcagtaatgcaagttcctctaaacgaggatagcgaacatttacatagtcggcgattcccaggtcttggcccaggaatagtttagactcagtgtgatcccattcgcggttaaatactgttgccattgtttaatttcctctctcatttaatatacgaatattataacaaaaaatccaacctacttgcaaataaaattttgctttcggttggatcgagcttaattacagagtacaaccgccactggaacaaccctgctctgccgcagagcctccggtatctacgtcaaagtttgcgtagtagaggttcttaatcccatatttagtggagttaaggagatctttgataatctcagtacccggaataatacctccaggatatttgttaaagtcgtagtacaggttggcactaatagcctgatccgtgaacttctgcagaaccgctaaccatttaatgtgctcagtacggtcaatgtcgaacgcatacttataggactgcatggtgtcccaatcgtctagacccggagctacagtaattactttgttaacgcccgaagtcttgatagttactgcactgcgaggaggttctactgcgttggtaacgccaatcaatactgagctggactccccaggcatacttgcggtcagaacggagttacgcataccgtgagttttgatctcttcacggaggctctcccagtccatctcgagacctacggaaaccaggtcatccacagtcttcttgtaagtatcgatcaacagcgtaccatcagaagtgtgagtgcggtggaaccattcacatgggccgatctcttttgccagacgtacagacgctttgtgaaggaagaacgatgccttctctgcttcacggtggatccagttacgggcttcttcgccttcgaatgccaggccttcagcggccatcgctcctgcagcgttcatcagtccaattcctacgttacgacggcgtaatgcagtgtacttcatagccgggaacggatagtgctgaatctcgatgatagtatcaacgaatttcaacaggatgtaagagatcttctcccattcttccagagttttgatacgacctagggcgaatccgcctaagttgcacagagatacttccccatactctgaaacatccatcttatccagttcttcgtctgtacggtacagatctaccacgtgagggatcgggaacgttggctgtacgatctcaacacaaaggttggacatgcgcaccggatctttgtaacgactgttacggtttacttcgccagcatccatagtgtacaggcggccagtttccatacgtacagttttccagaactcaatcaattctgcagcaggaatcaccggggctacagggaggacttcacccttgaacccacgtttggtaacacccgctagacgtttttctgctgcgatgtatagacgctcaaattctgctacgtcgccagagtcaaatgccgcatacacttctggagcgtacaggaagctcatcagtgtgatgttctctttacgcaggaagcgtttcaggagaatactgttgaacttcaagttgtagtccatcttatcgattttcttttcatcaggcgaacggttactcttagcttccattacctgaatgatttccggatcgaagaacgcagtgtaaacagttgcagaaccaccacgagactgctgagtgttagcttttacggagcggtcgatgtgtcgataatatggcagttttccagagtgtgggaatgcgccttttcgcaccggatcagcaattgatctactctcaagatgatagccgatccctgctcgggcagcgaccattttgaagacgacgtgctctgctgcgtcaatggagtccagggtgtcagtaccatcaacaagacagcaagaagcgaagcccctgtcagcactccgaaggcccacgagcggcggagttgggacgttgattttctgtagcgacagcgcgctataaaggtcgattgcatcgagcatactccagtgaggttgagaaagcattgccattgccatacccatgtaggcaaactgcggagtttcatagatctcttccgtataaatattacgtctagagtatttatccatgaactgcttcagaccagcattagtgaatagttcgtcacggctgtggtcgataacttcgtttagagcttcgaactggtcgtcagagatccagccgctcatatcttcccacgctcccagctctaccatgtggtcgtggaagaaacgcagagatggcggggtgtaagaatcaaacaggttcttacggagctgggctaaacgcagctctagagcgaatcggtcgtaacgatgatcacgctcgatcatggattcggcagacttaatcagcattgtttgcagatcgtctgagtgtacatcacctttcggcaggttcttaactgcggctaccgctaccggagaccacggaacatcgcttcggattccgatgtattttgcccagtcattcagcttctgggccatgaacggctcttttgtaccgtcacgcttgataacgtattcaatacgttgggtcattggtaactccttttggaggttgtcaggatttaagaaatattctactttgttttcggccattttgcaaatgagattttacagacaaaaacaggcaacccctttcgaggctgcctgtgtgtcggtctactttaataaaagtgtaattttttcattcgactaactaactctttagtaccgaggggttggttaggaaactcgtttgctatcttgaaagcggcatggtgtcgccgctcatcctcaggatagttagcattgtatttattgactgttgccagggatactggatgcactttcgttttacgagtgcggaagttgttcagtgtaaatacgttgttcatacgcgctcctagagttagaggtcaggacgttcgtcgtgagaagtgataccttcaccgaagcctacaaagccccagttttcttcagaggtaataccctcaccataaccaatgatcagttcagtaaccatattagattcccatatcgttaaagattgcctggaatgctttggattcagcggaacgcacgttatcatgtaactctactaaggagaatggcacatgttcgtactgatcgtagatatccatgatcagttgcagaccagaatcggatttaatgtctttctgcgctacgtcgccacagattactaatttgcaatcctgacctacgcgggttagaatacacttcattgcttctacggagatattttgagcttcgtcaacaattacataagaattgttgaaggtacgaccgcgtgcatgttcgatagcaaggtattggattgccttgcgttcaaccagcccctgataagaacgttcccctaaggcccacttgaagccgtcggcgattggttctaaccacggtgccatcttctcgttcagatctcctggcagcatccctagggatttaccaagaggttcgttcggacggactaggatgaacttctcgtacacagaaccaggcgttgctaactcttgagcggcgagaacagatgggataaacgttttgcccgtacctgcttctccgataccaactgttaccgtaaagttacggatagtgctgatatagtgtttttgctcagcgttcttcggcttgagttcttttgcggttggttgaaaacgctcccgtgcttcaaaatcaacagggatgacgttttcgtgacgttcacgttttgcgctgccattacggcgcgactccttacgacgtgctgcttttctcattgcgatctccttagaggtctacagagggtcaaatttcgaccatgtttatcaatttagaataccagtataccaagttttgccgtggattgcaactgaaattttctagaatgatatggaggacggatcctttcctttattcgcgcgatgcgcgggcgcgcacgagtaatataaaacaggggagataagcaaataaaattttccggtttttattgttttgatgatccagatcaagttactgttgattataataaaatagggttgacatagctgtgtctatttgatataatatatgcctaactggaggaatatatgaacgaactagacctaattgataatatctatagtatccttgataacgaaggtgaagaagaccttatgtttaataatgccaataaggcaagcgagcagtttcctacacagagggacatgatagctggagaggtttccaaatatgtagtagcacaggagcttccagcatacctattggcggcgcataataggggtgagatacacatccacgatatggactaccgagcacaggggtatactaactgctgcctggtagatttagcagggatgtttaagaacgggactaaaatcggcggagcagagattgaaactccaaagtctatctctactgcagctgcagtaactgctcaagttattgcccaggtaagctcatgccagtatggtggtacgtctatcgatcgtattgatgaagtctttgccccatatgtccgtaagtcctatgataaacacttagctattggccagcgttggctgcacgatagtaagaaggctgcggtatatgctactgaaatgacagagaaagaagtctatgatgcttgccagggtctagagtatgaagttaacactctattcaactctaatggtcagcagccgtttgtgacatttgggttcggcctaggggaatcctgggaggcacgtatgttgcagaaagctatgctggaagttcggataagaggcctgggtgcttcagggcataccgcggtatttcctaaacttattttcgcagttaaggaaggactcaataagtccccgagtgatcctaactacgatatcaaacagctggcgctcatctgcacttctaagagaatgtacccggattacgtgagctatgaaagagtatcggctgttacgggtgattttaagttccctatgggttgtcggtctttcctttcggctattgaatcgggagaaactgctgggcgcaataacctaggagttgtatccattaacctgccgctagttgctgtagagtctgagggatgcttcgataggttctggaagttgttagatgaatatattgataaagcgatggctgcccacgattgggctattgagcggttgaagcgtgtgcgtgctaaacaggcaccaattctctatatgcacggagcttttggggtacggttgaaagccaatgatcttgtatggcctatctttgaaggcagggcatcagtgtctttgggatatatcggtattaacgaggtgattgaggtaatgtttgaagataccgaccctatgtctccacctgcggttgaatttgcagtacgggttctcaatcacatgaaagaccgttgcaacaaaaaagctggggaaactaatctcggattcagtctttatgctactcctagcgaatccttatgcaatagattcaacactaaaattgccgaacagtatccggagtatgactggctaacggataagggctatctgactaatagccaccatctggatgtccgtacaaaagttgcccctaacgtgaagtttgactatgaagctaattttactaccatcgccaatgggggtaatatatcctttgtagaacttcctgagatgcgtaagtttatctctgcactagaatgggttgttgactatgggttaagtaagtcctactacataggggtcaacattccagttgatgaatgtgaggagtgtgggtatttgggcgaatccgtatccggagagcatggttttgtatgcccccaatgtgggtcggggaatatctcagttacccgtcgtgtttgtgggtacttaggtagtcctggtagtagaccctttaaccctggtaagcaacaggaagtaatgcaaagggtcaaacacatgaatttgaaataaatcacttgctaaatacctccgtttttgataagatagttgtaattgagaaacggaggatttatgaaaatccataaaactgatgaaaagcgtatctactttatgatggactctggagcatacggatctatttcccgagaagacgtggtaaaacttctgcgatgccgtaaccacttgtggaaagataaagtcgatcccagaacctctgagtgcttgtccgaaaaggctgagcagttgcggaaagaagaaatgagaaactatatggagttcctgtaatgcgtagattgattatcgtaagtggtgctggattgagtgctgatagcggagtgccaacgttccgtaagggtgccatcactcccctgtgggataaatacaaactaaccgaagtatgcaatattcaggcgttcgataaggggtttcactatctgaacgaccctatgcccccgttagaagccctttctgagggatctgatgatgagcctagccgtaacctgtacgagctaacccatgagttctacaacatgcggcggcaggagctgggtacggtggagcctaacattgctcacttgagaattgctgagtggtatgagcgcttccctggtcaagtcgttaactttactactaacgtggatgatctgctagagcgtgctggcattccccatgatgatgtgatccatgctcatggctaccttacggagataatgtatcgccgaggtagggatgtgatcgtggaagatattgggtacactgcggttgattaccgtaagtatgagtgggttaagcctgcaattacgttcttcggggaaaccgctccgtggtatatggggcagatcaacctgtttgataccctgacaacccaggatctggtaatcgttgttggtgccagtaaccaagtaatcgactttaattgggagctatttccggcccatagtcgaggtactaaagtgtgggtagtaaacaacggtattaactacctggagcagagtttgtacgaagaacgcgggatccccgtttggtatgatactgctgccaatgtatttagcaacaaacatttcataggtcaagttgaggcttggctggaggagaaaatttatgtaccatcccgatgatatcctgttatggcccaacggtagttggtgttatcgcagtgatgtacaagatatgagtcacctatcggacgactatcaggttttacgagcggactctgagcagtggcacgaattcatccaaatgggggaagaatatgctggtcaatgaaaaggttgttaatcaaggggttgggctagttccttgggctgaaattcctctggacgtaaaagagtctcttctggaccatcttcgtgtgtggtgcgataatatggaggtctacttcgattatgacaacatgcacctggggctatgggttcctatggacgaagatcaagatgaagtcctagactggggcgatctgactgagatggggctggtatttgcgctaggctacgtgtgtctgctacgtgagtcctatatcccggttggggttacaggtgtttcagcaggtatttgggtcggacgtaatgaagattattatgctccggaaaatattaacggttggatccaggtgctgcgtcgcttcggtttccaagttgaagggttaactaaatgagtattcctaaaatggaacgtatctcctgggcggatatccccaaggaattgattgatgtagcagagaatctgctgcgagccgcgttgagggacgaggagctttgcttcatcatccagcatgacgtgtgtgtcggcttgtccaaaggtagtttggcccaggattatgagatcctctttgattgggatgacctctcggatctggggctaatggttctggtgaacaacgttgtgttccacccctctaactttgcagcattccgggaaccgggggcaggtatttctccggggttcttggtagctgatgagccttggacgtatgctccagaggttcttcgtgagggcaaacaaaatgcctcttctaactcaattaatattatgggttggaatgcctagttgaacacttagaccaggggattatcctctggtcttttctatgcttaaacccagttacctaccacgtatttaaatattttacttgcaatctcgccacgatttttatataatatattcataggttgagagaaatgatgtgagttacaaaactgacataattcctctcattcacttccgagcatacagaacagtccggctgctacatgcttggttgggtttggtttattgggaaattgattccgaacggaattatagataattgatctagaatgcgggtaagagaggttggcatcgcgaggctctcagatatttgttcgttagtcatgtggagcaaatagcaccgcggtctgaaatgaccaagaagtgaagctgtaagtagcaacgtacctctgcgcaatagcgacgaataggggtcaaccacatggagcttagcggcgattacatgctgtgtgggagttgtgcgaagcggccagttctagcaatgaggaagtgaccacccctccatctataaggaaatttgttgagtcagtggacttttaagctgttctatccttgatagttcgagatcgctttattcttcaacataggagaaaacgtaatgttttctattctagaaggacacgcgggtttttcccgcgatcccgcttccggaaactggaaggaagtgaagacaactgattacctttttgcgaaggagttttctaacgagcatccagaaggtaaaccagcctcaatgccctacaaatttaacgtagtggatacggttgaccccaaaaatcttaatgaagcgtatgagctgatggttcagctcactcaagatccacatctcgtagcagtacgaggtacatgcttagttgcagagaaggccgtgcgtcgtaaacgtactaacttcaaaatcgaccataagagcaatattattgctatggacgtcgatggaatctctgatactggaggctgcgacaggtttgacatcgtgggtatgggacgtcatgtcattaagttattaaatagcatcagcgaggacatgttcccgctcaacgcagggtttattgcccatgcgtcgtcttcggctggaattaagccggggattcgtatgcacatgctattagagagtaatattcctgttactcagggtcagttaaagtttctatttacgtccctcaatgatagctctcggcagaagtatggttttgatattgccgacttagcttattattcatctgtacagctacactatttcgctgacccgattttccgggatcagtttaccgatccgtttaaagcggagggtaagccacgtctggttaaagttaacggtgctaggattgaactgcccagcactatgccagattacgaagccactcgtggggagtttaaagaagaattcttatccctgcttaatcagattaagggcaagcgtgtagcctctgaaaaagtggaacaaaccattgcagagctggaagaagcagaggatggtgtttatctgcgtattattcctaaactgtaccacagagcgctggaggacggtgttgatttcgcgtggcttgagaaagagattacctcagctctgtccgattatatcaacacgaaggataattcccgtagcctacaggattattttaataacgggcgtaagcaggcgttaaaagcgtttgtgaacaactctatgcgagatattcctgagtctaatgttaaaggcgttcctgtacataagttgacctctgatagtcccgatggtatgaactatttgaagatcaaccgcccaccaccggaaggtcatttaacgtttatcaaggcttctctaggtactggtaaaaccacagcagtgacgaagtggttagaacgtgatcagctgaaaggtaacttccttgcagttacgaacacacgtgccctggtttcatctaacgccaagaagtttgaagccggacagtatgataagtccgtagatatgttaaacttcaagcgtggtgccattgatcgtatgtctactactattcactcaatccacaagtttaaaaactttgttgggcagatcgatgttatctttatcgatgagtgcgatgcagttatgaatgatctgttgttcgccccagttgttaaacaacgtcgtgagtgtatctcagttcttcgggaaattctgctatctgcaaaagtagttatcctgtctgacggggatatcagtgcagaaaccattgaggcatatggatctctcatagattttgacaagccggtctcttattataaacatcatcgtaagatgctctcggatgctcaggcgtatgagttcccggatgaatccagtatttgggttgctctccaaacctccctagagatgggggagaaatctattctggtatccgactgcgggccggatgagttaaacgagaaaggcttgacgttaagaaacaatacaggtgcgattgttaaagagattcactcaaactctacatctgatatagatattcgtcgtatcttggattatacaacgaatgagttaattgaacagcagattgattgcctgctatgtagcccgtcagtaacgagtggtgttgacttcaactacttcgataacgtgtttgttatcactcgtacagctaaccaggcgccaaacatgcgcttccaggcaatcaggcgcgaccggggagctaagaatatcttctatttcatcgataagtccaccagcggattctctgcgggttcggaacagtataacatcgatgagggttggctagaattagctcagcagctgtatgttaaacgtcgtgaactagagtcccgtaactttatcagcacattgcgatattatctgctggatcagggagcaactatcgatatcttcagcgaaagctggggtaagattgatagctcagccgcagagtataccgccgagcgagtttctgctattttgagcagtaccccggattggtgtgcaccccgtcatgcggacgcatacgaagccaagctaatgctggtcaagtatttccacctggactctatcaagagtatcacacaggaacatgcggagatgtggattagtaagaaaccacacaaacgggcggagttcttccataaacttcaagatatattctggaaggatattaagaagtgttctaacgtgacgattagcccctttattgaagctctgaagaaacacaagaaggacttctttattaggacgggacagtctgctaaccctaaatatgcccgtatgtacttaacccaaatgggtattaataaggaaatggagacggaacagatcgtagactggtatcgaacttattgctctattgagggtatctctgtaccgtatgagtttatgacggacgaggagaaggcgctggctgatgaagcgcaaaatgaacttggagcacgtaatgagcaagcgtgatgctcgctgggaaacaaggaagtttcctaaacgcgatactaaacctaggaaggttaaagagatagagctatgcagagtaatacctattcgcttagcacagatgccgaatatttatgattggctagagtctcagcgaaagacacgtctctctatacgtattaacatggaactcaacatggggtacaagagtctgtctgaattcatgcacgttactttcgaccctacgttctatgaaaatcgcgattgcttagaagctaaatctgtattataatagtttcataaattcgagagaggataaagaacatggcaatccgcaaaaaacttcatgcgaatagcatcccggacgaaaagttcaaagaggcgatccaatggttagaagatggcaagaccaagaaaggtgcttgcgaaatcctcggagtagcttccaactccacgatggagcgtttgatcgaggaatggaaagataaccagcgtgtttctgctgaaatgcgtaaaaagaaacgtggtactaaaatcgaaggggctgagctggccaacgttatcgattcgtacctgtccggtgatagttttgaagcaatcgccgagcgtttctaccgttctgcaaacatgatccgaatggttctgtctgctcacggtgctctgcttcgtgttaatggtgaagttgacccactcttcccgccagcgattccagaagaatcaatgaaagaggtatttgaagtaggcgaacacgtttggattcccggatatcaatgcattggcgaaattaagaaagctctggataatccggtaggtgcatacagaatctatcttctgtctgaatccaagcagcaatatgttaattatatgtattgggatatcgctagtgtcaaacatctggaagctctaggggttgacatcaaggctctgggatttaagtggagcaaagaagatgtggcggaactagtaaataatgctgtaaaagcagctctgaaattagaaaagagaggcaaaggtgagtaaatatcaactcctaaacttgtttcagatttattccgaaggcgctacagctatccgagacctgcactatgcagttcccatggacgaagcggaagataatggctggcttaccaaatacgatcgtggtttgctgaagatgtatcgtttgtcccccaatggtttggtagctgttaaccaaatcctagaaaattctgtttgctttgcagctcagtaacttgttataatattctcatagtttgaaacaaaacttaaaaactcttttttaacaataaataaggaagtaataaatatgtctactccaactcaatggtctcctgaactcgaagctgaactgacttctgcctacgtcgccaaaatcgaactcttcccggaagatgagcgtcctggtgtctctatggagatcgtagctgagatcgctaaagaacacggtgtttccccgaacggccttcgtatgaagctgtccaaagctggcgtatacgtcaagaaagaagctggtaagtctaccgctaaaactggtggtgatgcccctaaagctggtggccgtacttctaagtctgatgctcaggctgaactgcgcgctgcatttaacgacgctggactggaagatggcttcctggacgaatcgatcgttgacaaactgaccggtaaagctgcctctcacctggctgaagctatccgtaaaatcactaaataagagggtattgcaatgaataaagcacaagtcgtagctatctgtgaaaaacacggtgagttttgcatgcaatacaccaaactgcgtaccaagggggtaacttacctctacggtacgactgagttcgatcctaagcaagataaatacctggctgagcgaatcgtccgtgaaggcctggaacccgctgacaaagatcatatcctggtctttagccgctctagtgataaattccgctatattccaattgcgaatattaagcgcatcaccagcctcaaccaagaacttgatcgagctactccagtaggtcgttaagacgcaatcagccccttcgggggctttttgtttatctgagaacaataaaaatgaatcaaaacatttgtcaggattacgaaggacatattgatgatcagtcccacgttatctttgaagatgaagggcgacagattcgtatgactgtctcggagtttagaggcaatttatactttggtttccgattatggttactagatattgaagataactggttccctactaaatcaggcttctcgttcccttacacgttagaaatgaccagcacgctgttcagagcgtttactaaaatactaagcaattcagaggttcttcatgaagtttaccgtgaatctcaaaagacccaagccagtgacgactaagttgctggctttttctttaaaatctcaattgcttagtgttttaaaccttgatataatattctcatagtttaaaggagatctttatgaaagatcatgaaattgctcaattggttaataagctaaccgaagctgctaagacgtatgctcatacccagcaactgagagcacacatgtctagaattattaatgaggcgctacgccatgaaaaagataactgtcgatgcgtattaccgcccaccaattaagggccaagagttaatcctaacctggattgaaaaagagaagggcaaaaatgtagttcatactctcgaagggtataagctcctaaacatgtggtacgaaggtactgagttgcgctgcgaactatacagccctaagtctgaacgaaacgtgataacacttttctattatctttgccgagatttcaattgggaaggaaagaccaagaagctgtgcgaacactacgaggttaaataatgcaacacgttaaagaatttatcaagttgtgccaagacgcgtactacaaaggcatgtcgattatctccgatgaagagtatgatgccttaatccgtcgttttcctctagaggaagagattggccctaaaggtgatgtacctcatctgttccgtatgttctccctacagaaagtgtaccccggccgcggcgaagaagtacccttccagggcattgaaacgccgaagctcgatggctgtgctatttcacttctgtatatcgatggaaagttcgtttctgcgttaactcgtggtaacggtatcctagggaacgatgtaactcataatgtgaagttactgaacatacctaaacagatctctcaaaagaccccggtgcagattactggtgaagtacacatcaccaaagaagttgagaacatgcgtaactttgcttctggtgctattaacctgaaagattctggagagtttctctcccgtattgcggaaggtggcctgatgttcacggcatatagtattcagtgtgaaaccggcaaagttggcttgaccgctactttctgtggggatatgcatatccttcagggtgatggttttgttacttgtctggatatctccagtcgagtagattggttcccaacggacggcgtggtggttcgtatggacggcaacaatcagtttaacgcagcaggttggactaacaagttccctcgtggtgcgtacgccatcaaagaagacgatgaaggcgaggttactacgctagaacgggtagaatggcaagttggggcttccggtaaggttactcctgtcggatacttcaccccggtagtcatcgacgacgctgtcatctcaaaagctaccctgaataacgttggctatatcactgcccttgacctagaaatcggttgccagattcgtgtaattcgtagtggtggggttatccctcgcatcgtagaacgcgtttacgagtaacacttgattcaatagatacaccgtgatgattttttaaagtagttattgacattttcatcgccagggtgtatactattatcattcagttgagggaaagaaatatttggtgagagactgagctaaattctgaaaaatttcgattgcttagtcctgattttcttgctataatatttatataaattgatgaggaagaaaatcaatgaaaattgaaattccactgaattgcccctcttgtggttcgaaactggacttagttaacgatcagttgttctgccgtaacaagtctatgtgtccagctcaaagcagtaaattaatcgagaacttctgctcaaagatgaagttaaagggctttggcccacagacgattgctaaactggaaatcacgaaagtttcagaactctttttcctgactaaagaagatttagtcagagctgtaggtgataaagtcgccacgaaacttgagctagagttggaaactaagctgagacaagatgttgactttggttcggttcttggatctcttagtatccctcttatcggtgaagttgctgctaagaaattatcccagctttacaacgatttccaatctgtgaaagcggaaggtaaagctggagaaaacttagcttcgtggaagaatacaccggcaggacaggacgtaattaatctaccatggaaattcagtggggcgcgggaaactcaagttaccccggcgactgaatccaacggagttgttctttgcattactggtaagctcaacgacttcaaaaatcgtgcggacgctaccaaatatctggaaagccttgggtatacggtgaaaacctccgtgactaaggctgtaaactacttaatctgcgaagatgaaaccaagatcggttcttcttcatacaaaaaagcacaatcgctgggcatcgaagtcttgacgattaaaattctactggagaataaataaaaatggctaaattaacctggaacgaagaaatcactgcatccctgaccgctaaagctaacgccctgaacgcgaccgttatctctcaggaagctgttgctaacatcgctgctgaactggctgctgaaactggtaaagaagttaccgctcgttcggttggttctaaactgcgtaaagaaggcttcgaagtgcagaaagcatccgacgtaaccaaatctccgtggactccgggtcaggaagatgaactggttgcattcctgaacgatcatccgggtcagtacacttacgctgaaatcgctgctgctgtagttggtggtgcttataccgctaaacaagtacagggtaaaatcctgagcctggaactgactgctgctgttaagccgactgaaaaggccgctgctgtacgtagctttagcccggatcaggaagctgctttcattaacgccgttgccagtggcgcgtccgttgaagcaatcgctgctcagttcgaacgtaccgttaagcagatccgtggtaaagctctgagcctgctgcgtgaaggccgtatcgaagctatgccggttcaggaagtctctaatgctaaggcacgtgaagacgttctggaaggtctgaatatcgccgatatgaccgttgctgagatcgcagaagcaactggtaaatccgagcgtggtgttaagtctatgctgagccgccgtggtatctctgctaaggatcacgatggtgttgctaagcgcgctaaacttgacgctaaatccgccaagtaattgatttgacctgaggggagaggaattttgttcctctcccctttttcgtttaagtagacgctaacgcggcgtagagagtatcttatgtataacgtccaagcagtagttttgaaaatgctcctagcctccgatcaaaagcaggtggctctagagacattctctagactgcgcaaagatcacttcaatgacgcatttaccgcgatctaccaagctgtccagaattattacaaaaagcataacggaatgccttcgttagatgctctaatgctagagtctaacagaaacgcaaggttgtctcaagcactaactgttttagcaaacactcagattccagacgttgacatatcgcatgcgattcatgtcctagagtcggaatacacacaggatctattcctgaatctgctagaaactgatgtgttgcaggatattaccatactggatcagggagaattacttgatcgagtagcggctctgcacatgaagctagaggaacgagtaacaacgactggtaaggtcttcaacgccgatactatgcgtgttttcaagagaaaagaagactccatgttaaatcttatctctctcggcatctcaaacgaatttgatgctcaacttggcggaattgccagaaaagaaacactgctactcggtggatggcgtggtacaggtaaatcaatcatctgttctaacattcaagtagcccagtattacaacggggatatcgccccatatttctccatcgaaatgccagagaatgaggtctttagacgtaacctagccattatggccggtgtttccgctaaggctatgcgcaatgactccttacaaggtattgaactcaacaaacttgcgaagactcgtgcaaaaatgttcgaaggcggtctggaagtatataacgattttgtatcacgttatacgctcaacgagatgagtgacttccatgacatggagactatgctaatgcaggaaagacccctgcacactccgatgatcatcgtgtatgatccggaacttagtacagcaaccatcgatgttgaactaactaagctaacctccaagtatggggataaggtaacaatcgccctgctagactatatcaaccaggtacgtttgccggatacgaagacattagatatgtatgattggaagcagcagatggttgtgtcctctacgttcaagtctacgtgccaaaagcataacgttgctggtgtagctccttaccagattgaccaacagggtaacgcccgtatggcaagaggtattctcgattcctgtgatatggctgcaaacctaaatgccgctaaacagaacgaggggcatgacggtgcaatcaagtttgacttcgtaaaaactcgtaactctgagggtatgacatttatgccgaagatcaactggaactcattgcgtatggatcagacttctgatcttaaactagaggacattcgtcagatggaagcagagtttgttatcccacttgaaagcgataaaccgaaagacaaaccaaaaaggaaaaaggcttcggatgaggatactaatcccaccggagaatcctcaagagacttatgagtagaataaccgagcttttagatctcaaagggattgaatacagagatacgggtggggacatcctcatccgctgtctcaatcctgaccatgaggatgcacatccaagtttacgtgttgaccccgattcaggggtttttcactgcctaagctgcggatttggtcgtggtataccaagcatctttcattacttcaatgaagaacaatacaggacgtctcctagactcctgaaagttcgcagaatgattagtgacctacgaactgagggtcgcggtctagaaattccagaatcagccatgatattcgaccaggattttcgtggtatcaaagcagagactttcaagaagtactttgcattccaacaaacagaggactgggaaggtcgtgtagtgtttcctattacggatgccgtagggagaaacttattcttcttaggccgtaatatggatagctctgcccctccgaaatatatgattagacctaagaaggtctcccctccaatcttccctgttcgctataacaccccagccctaatcctagtcgaaggtatattcgacatgttgaatctagaagacaaaggttgccataacgtttcctgctgttttggtactcaccagttctctctagataacatagcagataaattcatgccgttccaaattgcaggtacgactcacgtagtcatcatattggacaatgataagtccggtaacgaggcatctaagaaattggccaaactaatacgtgataagaccagaattataccgattataggtaacttcttgcttccagagggcaaagaccctggagacctagatgctgaagaagtcgaccagctcatcagaaacgtagaaatcttgattgccgaacatgtcaagatttgatataataattgggtaagtttgagaagaaacactgacgttttacttgcttacctaataggagaaatcaatgaaaattgcagttgtagacaaatcaccgaataacgtccgctatcagaaacacttcgaactctttgaccatgaagttgaaaccttcttcatggctagtgagaaagtaaccgggcgactgctcaagaaacatatcactatcggaacaccggagaacccgttcaatccggaagattttgattacgttattctggtaggtgcagacccgttcctgaagtttgcagctaagaagggcatttccgattactcaggtaaacgtgttgagcatgatgggtatgctaactggattgcaagtatcagtccggcccagctccactttaaaccggaaatgaagcctgtatttgaggctactgtagagagcatccacgccattctcaatggtcgtgaaaaacgttctaaagcaggtgattatcgccctattcagtgcccggatgaagccgaagcatacgtgaagatggtgtataccatgtgccctggcatgattgcatatgactccgaaaccagtgcgctgtactgccgagatggttacatgctggggatctcaatctcccaccaagagtatcagggcgtgtatattgacgcagacgtcatcactgaaaacaccgtctattacttacagaaactgttcgacagcccggaacatggtgttgtgttccataacttgaagtttgatatgcacttctactgctatcacttaggcttatcctttgataaggcagcggaagagaaacgccttcatgataccatgctgatgcactacgccctagacgaacgacgtggtacacacggtttgaaatctttggcgatgaagtatactgacatgggggactacgattttgaactcgaccagttcaaggaaacgtattgcaagacgcataagatcaagaaagaggatttctcgtatgatctcattccgtttgatatcatgtggccttacgcagcaaaagataccgatgcaacactgcgtctatccaacttcttcctgccaaaagttgaagctaaccctcgactgaagtctctgtactacgatgtactgatgccgggatgtgtattcctacagcgcatggaagaccgtggtgtaccaatctccaaagatcgtctgaaagaggctcaggttcagttaatgactgcgctacagcttgcaaaggctaagctgtacgagtaccccgaggttcgtaagctagaggaagatcaaggctcggtgtttaacgcagcctctgttgtccagcttcgtaagctcctgttcgattatgttgggttaaccccgacgggtatcatgacagatacgggtgcagattccaccggagcagatgccctgaaagagctttcggaccagcatccaatagctaagactctgctagagattcgtaagatctccaagctgctctcgacgtatatcgagaagatgctgatcagtattgatgctgacggttgcattcgtactggattccatatccatatgactacatccggtcgtctgagttcgtctggtaagctgaatctccagcagttacctcgtgatgagtctgttattaagggttgtattgttgcccctatcggttatcgcattatcgcatgggacttaacaactgctgagatttactatgccgctgtactgtccggtgacattaacatgcagcaagtgtttattaacatgcagaacgacccggaaaactactcggacttccacggttcaattgcacacatggtatttgctctgccatgtaaacctactgaagttaaaaaactgtatcctgcactgcgtcaggctgcaaaagcgatttcgttcggtattctttatggttctggcccggctaaagtagcagcgtcagtaaacgaagctctcctagaagagcacatgaagacgggtaaaccgtatactgaatgtactactggtgatgcgaaagagtacatcgaaacctactttggccgattccctcagcttaagaaatggatcgataaatctcactcccaaatccagactaacggcttcatttacagccactttggccgtaagcgtcgtctgcacaacattaactccgaagaccgtggtgtacagggtgaagaactgcgttctggcttcaacgccatcattcagtctgcatcttctgatagtctcctgctaggcgctatcgataccgataatgagattcgctctctgggtctgcaggacgaaatgaagattatcatgctggttcacgactccgtggttgccattgttcgtgaggatttagttgatcagtataacgagatgctgatccgtaacattcaggtagaccgtggtatcagtatcccaggctgtccgattggtatcgactctgactcagaagccggcggttctcgtgattactcctgtggtaagatcaagaaacagcgtccttctgttgcttgcattgaggacaaggagttcgaggagaaagtacgtagtattatcggtatggaggacttcgactacgctgctattgcggctaacgatgaaaaccaccctgatcacgataagtacgccaatattaagttcttgccggaaatcagcaaagatattgtcaacgttcgcagggttcttggtgcttaactttagcttaccagtatatgctttaagggcttatgatgtactcttccaagagggggagtacattgttatccagacgagatttacaaggtatgtgctggacaatccgagccttcctgggacattctctcagcgaaggctttttctttatggtgagcgagaaaatttaccttacaagctctatcccttaaagaaacagttcaagtacttatctcagataataaactctggactaaagcatttcatcgactccacaggtaagatagtaacatggaaacctacaacttattacaacattatcacggaacgcgttaggggatcaactagaatcttcaacggaaagtaccagtgttatgtcaagaacgttccatatcctttcttacttagtgaacctgccaactatatttcgtacgcgttggttcgcggttcacccgttatttttgatacgcacgaagaggagccagaaactcctagacttagagttaagatatgaagatagttatatctaataaaatctattgtaaacccagcaacgaactgtgggaatacttattaaaacacacttcataccagatctttaaacctggggcgaagtatcctctaatgttccagaactcaggatcggtaggtaaagaaatcaagtggttccctgtaaccagattagatctcctagaatctttcgggcaaaaagtgacagagatcgtggataaacgtactctggttcctgtggatattccaaagccctcgtttaccttgagaccggaggatcagctccctatatatgaagactgtaacgatacgtgcattattaatggtaagccggggttcggtaaaacaatcctagctcttgctatcgcccataaacttgggcaaaaaacgttagttatatgtaccaacaccaccattcgagctatgtgggagaaggaggtacgcaagttcttcgggattgagccaggagttattgggtctggcaaatttaatatcgattctcctatcgttattagtaatatacagacagttaacaaacacggagccgctttggcaaaagaattcggcaccgttattgttgacgaagtgcatcactgtgtcgccaccacgttcaccaagtttctagagcagtcctcggcacgatataaaatcgggctatccggtacgttgaaacgtaaggatgggttacaggttatgtttaaggactattttggaacgaaagtgtatagtcctccggtaaataacactttacctcctactatccataggtttgcgctaaaaacgcaggtttctggaaatatgaatgtgccgtgggcgataagggctaacgatgtatactcgcagccagagtactttcaacaggttgttgacttgtgcgagttatattcgatggcaggtcataaagtcctgtttgtgtccgatcgtatagatctgatcgagagagttacgaatgctttggaactcaggggtgtgaagacctacacgattaccggtgtaacttcgctcgatgatagggaacaggtacagattgacgtgaccaatgacggtccgtgtgtattagcggcttcccaaagcatcttctcggagggtgtgtcattaaatgctttatcgtgtttagtgttaggctctttaataaataatgaatctctaatcgaacagttggcaggtcgtgtccaacgtatggcagatgataagttggacccaatcctcgtggatctgaagctaggaggtgtaggattcaagcaggcggcaggtagagaagcggtatatcgtctcaatgggtgggaagttcttgactttaacgagaagaatatggtaaacttagataaaattctgtttgctaagaaccccaaagtttgatataatatttatattgaattgagagacagatttacaaagaagagttaagcaaatagttaaaaatttcagttgctgagtcctcaaaaatacgatataatatctgtataaattaatgggaacagcaactgaatcttcggaaagtccgaagcagaaaaataaaaaacttagttgctaaattctctcaaaatggtgtataataatcatgttgttttatgattacgaaaaaatttacatattagcgagaggtaactcatcgctgattgtacagattatcagacgaatggttgaagatcccgaagctcatgttatgttaacgggtagatcatttatcttgaatgaagatacaatcgtttataataaacgaaagctgtcagaccgacagttggctgagtatctaggacttttgagttttagaaactatgccgaatatagcttctctaaggatacatcactggatatgcaatatattccgccgtgggttcctagagcagttatcgagcaccacccactaatcgcaatcaacaagtcaaaattgacatttatcgaggaaaaataaatatggctactaaatcttggggttctactactggcggttctaacggcgacaaactggactacatgaagttcaacaacggtaagaacgttgtgcgtatcgtttccggcgttctcccgcgttatgtgtactggattcagaacaaagaaggtaaaccggctccgttcgagtgcctgcgtttcgaccgtgagaaagagcgtttcatccgtggagcatccgatccggttcacgacatgggattcaaggatccggagaagaaagatggtaaggctcagccgctgcgtcctaagaaaaactacctggccgttgttatcgatcgtactgataacaaactgaagctgatggaagttaaggcaaccatcctgactggtatccactccatcatggcccagctgaatctggaagatccgggtgagatcgatatcactatctccaaatctggtactggtttcgatactaagtacgatgtacagcagatcgcagctatgcagttccagatggctaaaaatcagccgggttctaaagaggccgccctgcatgaagccgacgttgctctgattggtgaggctctgtacaacgaagcggacgaattcgaaggcttcgaaaaggtgcctaaactggatgttacctacccggttccgtcctatgatgagcagaagaaagcaatccaggcatggctggaaggtaagaaagatgaggagggcgatgaatctaaaggtaatgaaggttccgcgaactccggtaacatcgatcacgaagcagcttctgacctcgattaatccaaacaaggggagcttcggctcccttttattttgactatgaaaatacttttctcagcagatcatcacatcaagctaggagcgaagaacgttcctcaggaatggcagaaaaatcggtttattcttctcggtgaaaagctggacgaagtgtttggagctactgggtgtgaccttcacattattgggggtgacatcatggatgtttcagacccgtcttcagaagaagttgaactactgttcgcattcctagctactctccaccatcctggtattatttacaccgggaaccacgaaatgaaatctaaaacgatttcttgcctggatcactatgcagcagcaattagcgacgcaacagacggactttggaaagtcgttaaagactaccgatctccagagttcgatatcatcccttacagcagccttcacaaagctagttggaagcctcgagtttcagacatttgcttcacgcatgtcagaggtgcaatcccgcctcacgtcgtaccagaaatcgaccttgaaagattcgtcgaacatgggtactccaaagtatttgcaggcgatctacacagctacaagaacagccaaaagatcggggacgttgacctgctctaccccggatctccgcttacaacttcgtttcacagagaaaggacgaaaggaactaacggagcttttatcatcgatacggtcttgccaagagaccatgagcactacctttcgtgggttgaactgggagatcttccacagctcatacgaaaaactattgaagtcggcgagccaatggaagccgatgcgtatgacagagttatatacgaagtcaccggcgacgtatcgcaactcaaaacgttaaagaacagcgaactgttggataagaagatcaataaccgcgtcactaaagatgctaagttagatcttgatgatatgtcgctgctacaggagctggatacttattttacaaacgtgcagaaactagacgaagcgtctagaactcgcatattaaagagagccgctgagtatgtcgatagtaattaataaattgacaatcagccattttatgtcgtatgctgagaacgtggtgatcgaatttgataatcaccgcgtaactcagttaatcggacgtaatgggctgggtaaatcaacaattggtacagctctagaggaacttctttataataagaactcacgcggtatcaagaaggacgacctgtttaactggcatactggctctaaggcctatacgctagaaggtcagttcactaaagatggggacgtgtataacgtcaagaaagttgtgaagtcaaccgccaaagtaaccctcactaaaaatggtgaagatatcagtggccatactgcaacccaaacgtataagctgatagaagaggtactcgcctgtgattttacgacatttactaagctcgtatatcagtcagttggatccagtctcgacttcctcaagactacggatgctcagcgcaaggctttcctcgttaacctgttcgaccaggaacaatataaggaagtttctgaacgtgttaaagcgggacgtaaagccgtctcggcaaaactgtccggattggaaggtagcctgcgaactgcccaatctatactttcctcaaaagcctcgcttggcacacctcaatcagagatcccaatccctgttttcgatgaagagcccctagtcgaagaattaaccgaagcaaaagtcaaggtagcactggctcagaagcaaaaagccagtattgcaaaacgtagctctttggacatggccgtacaagctgccgaaaaaacttttgcaccattcgaaaatttacctgcgcccacctcgaaatctgaggaactcctgagtgttacgcgtaacctaacggtcgtggcaactagagcggatgatttgaagaaacgttactacgatttcaaaaatgcggcgggtaaaactcagtgttctgcgtgcggaactcacttagacacctccgccgcccaagaggccatgagacgaactaaggaggagtatgatccgctatataaagaacgtcaaaagctggaggcagaagttgaagaacttaggaaggaagatagggcgtttaaggattatatctctaagtttaacgctctggaacaggctcgcaaaaacctcaaggaatttgatgaggtcaatggaacgcaggatgaaatcgtagatgcaagcggattagctgaacgcatcaaagctattgaatccagcattcgtcagggcagatcctcggtagaacttgcaagaacccataacgaatcagttgtacgtgaaaatgcgaagtatgaagctaagcgtgagcagattcaaaaggccgagcaggagtttgacaagatccaggctgaactgtccttagttgcagaagaagtagcggatctagatatcttaattaccgggctgaaagatctggtagggtataaactagagcacagcgtcaaggtatttgaagagatgattaaccactatctctctatcatgaccagcggtaaatttgctttagggttcgagttggatgagacgaagttacaggttgtcatctacaatgatggtaacaggacttctatggtcaactgctccactggtcagcagagccgcatcaatatttccacgctattagcaattcgaatgttgctttcaacaattagtaaggttaatatcaatctgctcttccttgatgaagttgtaagttatattgacccggatggaattaataccctcgtagaacttctacaggaagaagatcagctgaactcaatcatcgtatcccacgggcacacgcatccgtatgcacataagattgaggttaaacaagatgaagctggcttatcaattttggaggcctaatggccgtagatagtcgcgagaaaggaaaacgagcggagtaccaaatccgtgatatgttgcgtaagtatacctccttggactgggaacgtgttcctggttcaggggcttttggccaatctcactccctaaagggggatgtatatctgccacctagcgtgggtaaaatgagccaatactgctttgagatcaaacattacgcagacgagaaatttaatagcaatatcctaaacgttggagaatcccaactagaaaaatggtgggcccaagccgcacgtgaaggtgagcaaatgaacatgaaacccgccctgatctttaagaaagatcgtggtcaatggcttatcgctctggatagtagcgaccctatgattgataacctcatgagtagagcacatttcatagtgaataaacgtggaatggaaattgttatcggtctttttgagccgtggttaaacgcatgtgatattggagatttagttaaatgagtaaatcctggggaacaatgaaacgagaggcagaacaacgcctcgcctcacgccgtaatcttatgattgttgacggtactaacttgggcttccgctttaagaaagatagtggtaagcctattgcagcatcctttgcaaacaccatcaactctttggcaaattcctatgacgcaaagcacactatcgttctaggagataaggggaagagtatcttccgtaccaatattttcccggagtataagggcaaccgagacgcgaagtacgccgatcgctccgaagcagaagtagaagcggaccgccagttcttcgagtacttagacgatgcgtttgatcttatcgcaagtcaattccctactttccgaattcgtggagtagaggcagatgatatggcggctttcattattcagctgataggtcatcactatgatcatatctggctcatctccacagatggcgactgggataccctgctggctcctaatatttcacgcttctcgttcactactcgtaaagagtaccacgagaaagatatgttcgacaaccataacgtagatactgtagatcagttcatttcattaaaagccattatgggcgatatgggtgataatatccgcggtgtggaaggtatcggtgaaaaacgtgggtataatctaatccgggaacatggtagtgttctagacattattgatgcgttaccgctcccaggaactcaaaaattcgttcaagcgctgaataaatcaggcgaactcatggaacgtaacctaactctagtagatctcccaagtttctgtggagaagcagttgccgcagcaggacaggatatctacgatcaatttgttaaagacattatggctattgccacaggagaagtgtaatgcgtattaaattatctcatcccgattgtaaacctcacgttggaagttcggaagcagccggtatggatctacgggcctacttcggagatcgtgcttccgacctattgcgtgccattcctcctggggagtcattgatgattgataccggagttgcggttgagattccagagggctgggtaggaatcgtggttccgagaagttctctaggaaaacgtcggttaatgattgctaatacaacaggggtgattgactcggattatcgaggaaccatcaagatgaatctgttaaatatgagcaatgagacgcaaccaattgataacttcgagcgtctatgccagttggtgatcgtaccccattataaccccaatgacattgaaattgttgatagtctgacagacactgatcgtggtgaaggcggcttcggaagttctggtaagatgtaaatagaaaaaccccagcggattgctccgactggggttttgttttattctacctctgggtcttctggaaattccacttctgggatttccacttttggcatttccagacgcaggtcaatccaacgaccttgtggtatctccataggttcaccagcaatgatattacctgtgttaatatcaaatttacgagtgaacacctgtatgtttagctccttctcctcttcattccaatccgattctacgaagcacaacatattaccgttgtcatctcttggtaattcgaatttccagccttccgtgttccagcctaaactccctttaattgtatacttgcctagtccagtttttacagcaaatacaccttgagcctccgcgttacaccctacgtaacctcccacagtttccacgcctgtccagaagaatgaatcctctttgctaggaatttctgcgatgagtttagcaatcggggaggccttcttaacaaaaccattaccatctatagtaatacctgctatatcagactggatattcggtttagagtactctgtataaactttaaaccataccggtggggtattaccctgatcagcccttaatgatctaatatgcagaataggtgcagtagcattactctgcatgaagaactgcattatacggtactgggtgtgcctaacgttgaggatagttccaagtcggccattggttccatccggagtattttttgttgatacccctgattggaatacacgcacaccatctgccccccaaggatctgtaccatcaggtttaggtatcacattcaaatcatctaaggggttagctgtaataccagcagccggagctttatccatgatatgttgaatagccgcatcttggcgtataagtgcattgcctgctgatgactggggagctgtctgcttaatgttaccgtcatctctaatctgaagctcagtggaggttacttgatcaccttgtggtctgaaagttataaacccactagtttgattactaggattattcgtagagagaacaaaagacccgttggagttgactcgtatgcgtggtccacctaaccaactaatagtttggttcccagtatccccgttaggcagaattatattcccgttaggtagaaactccgtagctgcaatactagagtcactggtacctcctggcctgagggaaatagacttcttattggtggatagtatacctacttcattcaaataggataaaagaagtatagagctatcggtcttaccattagtgatagccagctgcttaatgcgggctagactaatcccatcatcaatcacttgtgctctatttacatagataacgtcagtatcgaaacctgtggttttccacgcaggagatgttccatccactagaggtccggtaggtggggtaacagaaatagatcccgaaagaaaagccatcttaggatctctaaaactactgcgggatttaaggtatacatcgtaagttacattgctcccctctatggtggacttaagtcccaccataaatccattcgtgttggccggacctattacccgatgactaaggaagctgccgatgttatccgcggttacagaggttacaggacccggtaacgccagagatactatctccatattgtatatatcatccctgttagctccgttacctgtggcgtagagtgcaaacagtaggtgaacgctggaagactgatttgaggctattgttatagatgcaatcttagcttctgcagagccagtcataactcccagaggtgttactatagacgccttacctgccacattctgggctaactgggcggacgctgccgcattagtttctgaagtcttagctgctgtctgggaatttttactagcagtttcagaagccttagcattggtttccgaagttttagcagcagcagcggatgctgccgatctagtggcagcatccagtaattctgtagcagctagagagctgactgaatagcctagctgtactgtaaactttgggtacttacttacccttgagttagctccgtcaagggcggtaacctgttgtgcaataattcttgttgtaatagccattacgcggttactccgtcactgacgtacacgcttccttccataactctatgagaggtagcggtagctcctgttcctttggtcatgattacatcgtagtaacctgcgaaccgaagtctaggattatatttatctcgttctttacttgctttgttaacgattgttgccacagtggccgctgttagtcctagcgacgcctggccttgtgtagcgtttactactgttactacgaaatctgctaattttaccccagtggattccagagagtctttaattgaagacttaagggttacccctgtcagattgacaggggtttccgttgctgggtaagcagagtcatcgatatccatgaactgtagcatcagtccgtatgatacgttttgatcaaggataatatcaactactctgttttccgtgctcatttgttaccttatatgaatgtacccgttaagcaggtctattttcatggtataattgccctctgggttagaactaagtgctgccgctctgttatagataacgtcaacaccaatctgagccaggaacgcgttgcttgcaataatcttatcagcggtaatagaaccagaaacgatcatatcaccgtgaacagttaatgctggggctgtccatgccgagccattccattgacgagtccaggagttctgcggagagcccgacttatactgagttagtacgtcatacttaaccggaggtcccccaaatgttgactggaagaaagatgctgcctgagtatcgttccatccggttaagtttgtgatcgcctgagtatagaaccccggaccacgctcacctttagcaccactgctccctgctggaccttgtgggcctgtatcccctttatcccctttactaccctgtggaccttgaggaccagtatcccctttactaccctgtggaccagtagcaccggtgttaccctgtggaccttgtggaccagtagcgccatctgcaccatccatagacagatcttcaatcgctatagctgctacgtaagcgttaccgaaaggagctgcgccaccattcatctgtataaatggtcttgccctaccggtctcagtagcacttccgtctgttaccgtgacaacagtggaaactagtctccaaccctcagggtctttagctgaagcaacaggctgagcgggccacgcagtgttaacgctaccactagcgttctgacagtgtagtccaaggcgtagctggtattcaccctcagagttgttcacccatgcagttacacggtagcgcattcctttgcgagtagggaaccagttattagcctccattgtgtctctagaggtacacagtatagctttggtgtgtcctccaggctgtccgttggcaatatctactacatcacgaccccatgaccctctgttaccagagtcaaaggaacccgtgaacaccctatcgtaaccaataccgggcaggttcttcttgagtgtaaacctcttaataagcgttccatacttaggatgcgtagccttatagtctacccatccagaggtaatctccatcccatttggcatagcactcggagcataatagccgctcgaacctatattgccgttaagattactcttatcctctactccgaaggtgcactgactagtaacatctattgtcccgtagaacactttgaaattaccagtggtaccatcccaattctgcacaaaaccgtatgagttacacgataggttagccgcttcgttagttaagtatccaactaaagagttcaccccatcctgcagtctaactattgtaatagaatcagaaatcccatcacacgttgcggttactgttacgtactctgagcttccgaattgggcagaggttatagtcttgttggtggcggtgccacctaacgttatattacctcccgcttggttcttggcagtccaggttattgcagcagtggtattctgtctccagctgtcaatcttgatagtaccgttagacttcaggttaccactagtatcgaagctaaatgacagactatcggatgttagggcaaaggctttggcgttagcaccattcggaccctgtggaccttgaggacccgtagcccctgtgtcccctttgtcccctttactaccctgtgggccttgtggtccttgagaaccatcagcaccaatagtatcaagttcattcctaatgaacgctgtagcgaaatctccttcttccagcttgatattggaaacaacgttggttccacctgggttgttgttcagggacacacggacagataccctatcacaccctgcagggacagtgaacgaccagctagtcctaccagcagttgttgacgttacccacgaaaacgctgaggtagtcgtgttggctcctgcctggataaagaacacgtgcattctcatttccagagcactatcagtgtcaaacgacatagtgtagcgcttaccagcagtaaccttagtgaagaacgtaccatcaccaccactaggcatggtatacgcatcattagcaccaggacctgccgtaatgcgtaagcgtagttcgtcagggttttttgcgacggtagaaccactaccactggcgcccgttatagacgcaatccatgctttgttcgcaaacaggttgaggttaactgtctcaccatccaaacgaacaggatctgaccaagtcccctgaagttggttgttcgagttaaactcacccttaaccatccatagcggagaaccatcaggaggcgcatcagaccagttagccggagagttaccggtaggtctagctggtttggttgcagccacttggaacctcagggaggtatacttaccatcagcaccaacctgaccatcttcaccaactgcacggattgccgaagaccacacaccattaacttgctgacgcatataaatgtcgccagtagcgtaatttgtgtgccagtcgttagcgttaccagtcttagaccactgaacaccaactgaagctcctgcaggaccctgaggaccctgaggaccagtatcccccttgttaccttgaggacctgtagcaccagtgttaccttgtggaccttgtggacctgtagctccggtagcaccatctttaccaagtaaatcactaggatgtgccacatatgccgtagggaacgctccgagttccagcttaggtttcatcagtacgttagtctctcccatgttagagattgacatacgcatagacagatgggtggtgttagctcccgtagtaatagtcaaactgttcctaccagtactggttgagataacctggttgttacgtgcgtgcgtacctccattaccattatcaaactgcaacaacatcatcctagtggacacagcggtttccatttcaaatgataaagtatacacagtattgggtgccacttctataaagtgtgtgcctgttccctggtaaggaacagtgtacgcatcatttctggatggtccagcggttacccggaatctcatctggtctggattcttgctaaccgaagagcccgtcccctcagccctctgaacagacatcatccactctttgaacgctaagaagttctcacctacgccggaagcatcgatacggactgggtcagaccaagccccaatgatagcgttagtgtccccattaaacgttgctgttgccatccaaagaggagaaccatcaggtggagcatcaaaccagtccgtaggtttattacctattggtttagccggcttagtttctgcgatacggaagatgatattggtgtaattacctttcttaccgtcaggcccgatttcacctttctcaccgatggcacgaattgcaggaccccagacaccgtcaacgttttgacgcatgaacaagtcacccgtttggaaggtatcatgccagttactagcggagctatccttagaccactgtactagaactgatttacccactataccgatactgtctgagtattctacttgatactcggttttctctccgccttcttccagcttaatcatgctccatgtagtcgccacgttaagggtaagggcagatgggcgtagagttaagtagttcatacccgtaggaactacaaaagtacgcttaactttgattgatgttccggtgttcaactcctccatgaatgtagattgtgcggagtttggagtagcctgccagaagatgatatccctagtctgaacttcgcttgccgcatcaatattatacgttaaggtatagcgcttacctggggttaccggatgagagaacgctccaccaccaacatacggagttgcgtagcaccctggagccgaattatcggttccggaagtacgagtcaaggtatgcgttagcttctcaatatcgttcttcgatgtgccggattccgtacccgtcatccctgccatccacttacgaactgcgaacaggttagggttgatagtcccgtccagacggactgggttagaccaggtaccttgcagctgaccgctagcattcattgtacccttagtcatccataaagggctaccgaccggaggagcatcactccagctacctgggttgttacccgtaggtgtgccaggtttagtatcttgaacgataaacttcatcgaaatgtagtcaccgtcagtaccgtcagcaccatttttaccgtcttcgccaactgcacggatagcaccgccccagaccccattaacctgctgacgcataaaaatgtcaccagtttggaaaccagcgtgccagttagtagacccatccttagaccactggacgtttacagaattaccagcaggaccttgagcaccagtagcaccagtatcacctttatcccctttgttaccctgtggaccttgtggaccctgagaacctgttgcaccagtatcacctttctcaccatccatttctagggcaaaaatgtggatatcggtaatataggctttacctaggtcactaccagaagatccattcatctggatccaaggcattgctataccggtattagaactgccaacagtaaactctttttcgatgtaagaccagccaccaggtaccggtgtaccctgtgcaatcataagagttccttgccagtcaacagctccgtcagccgctcttacgattcgcattcccatgttgatattgactttagactcgttagccattatccacatgcccagcctatatttctgaccagctactacgggaaatgcgttagcatcttctatacagtctctagcagagatcactagggccttgctgaaacctgcggctacaattgtggcaccagaaaccccttgaacactaccagtcgaccaggtacccttatttccgttctcgaatgaagtggtaataacgcgatcataaccttttgcaaggatagatttagtagttgccactctgcgaaccacggcaccgtaagtagggtgtacagcacgtaagtcgacccaaccgttgataacatcagtaccagctggcataccttttaaagtatatttgcccactgaagtaatatcagcatcaaggttattcttctccatagtactgaaggtgcattctgaggtgatatccttcgccccatagaatactttgaagtcaccagaaccagtactgtagttctgcacgtaaccagcatagttcgctagaactgtggaaccttcgttggtcagaagacctacaagagcgttggaaccatcgtctaggcgcacaatagtgatctgatctgtaataccgtcacaaacagctgtaactactacagacttcgatgttttgaagttagcggcagtcagtgtagcaccagtattactagtacttgttagtgtaatactaccgcctttctcgtctttagcagaccacgctacgttagccgtagtattctgacggaaagcctggaacaggatggttgcatcggacttcagtttaccttctgcgtcgtacgtaaacgtctgaccgagagaagagaggctgaatccttttgcattatcacccttagcaccttgcggcccttggttaccctgtggaccctgattaccctgaggcccttgtggaccctgagtaccttgatcccctttttcaccgatactgtcggaagcttctacgctgtaagcagtagctttaatgccttcttcaagttttaggttggagtaggtaaccgttgctccggcagtacgaacacctggacggaagctcaggaacttagtatcagcacgagtgataatcttagcttcctgcttacctttagctccggtcagtaactcttggaaattagtaaaacttccagtaatgctagagaactctagtaacaggtctctcaaagcaaagctggtactatcagtactaacctcataagtgaagatgtacgacgtgttcggctttacaggaatctcaactataggcccctgcgaaccttggaagggaacagggtgtgcacccggtcccgtagaagaggtggtactttctgtgttggttatagtgaagctgagggtatcaggattcttaaccatggtaccattactcattccggtccactgctccagtgttttcttaaccggatacaggtttaccccaatgccttcaccatcaatacgaactggctctgaccatgtaccgactagagcgttagtctgtccattaaactcggccttaaccatccatagcgggtttccctgaggaggtgcatctgaccaacctgaaggagcttgtcccgtaggagtatcaggtttttcagctgccacacggaaacgcatcccaatgtagttacctttagaccccggagtaccattagtaccatcttccccgactgcacggatcgctgaactccacccaccggtaccaacacgctgacgcatgaagatatcaccagtagtaaagtttgcatgccagttagtagtaccatctttagaccattgtacttctactgaaccacctgccggaccttgtggaccttgtggaccagtagcaccggtggcacctttctcgccgtctacacgtaatggttctgaccagccttctaccttcagtgcgttagtattaccatcgaatctaccagaacacatccaaagaggggttccagttggtggggtacgactccaaccactaggatcattgatattacctggcttcgtgggcttactagcattgatctggtaaatctgaacagtgtaatccccgttggagccatcagtaccaccagtacctggaacaccagaccattgagacgcggctgagtagttagtgccatctgctagagcaggagggtttttcttaggatccagagtaccctgcacaacatacacgttctgcttctgatcagtacggttaggagggaatgccgaccacccagctggaggatagacctggtcagtaggacgcgtcggcaaagatgtcccaagtttgtaagcgaatacagtctgcttaccctgcataccggtttcaaggtctacgtcgccacccggagtaccgattacaacgttaccagaaatacggagagtgtcaccatcccaacgtacgtactgggtgttattacccaggtcgaatttggccttgccgtcagtgttgtccacacccatccagacaccgcctgcgttattaccgtatttcttaccctgagtgaagattgccgggttgtctttaccggtcaggttagtaagaattacgttagcagcgttaatgtctttagtgataactttaccgtcgacgttcacaatcttattaacagggtcgaatgaaatcggcgctttaccattttcatcgagtgtaccaagaactactgcaccagtagcagcgtctactaagaaagtctgctcccactgtttggtgttagaattccagagtttacccttgatacctgcgtaggtcatttctacaccggtctcattaatgaatgcgttgtcgaaagtagtgctttcgtctataatataagtaacttcattagagttagttatagactgagtatctggaccccaagcaaccgatagcacacggaagcggtggcggatcttataagggaagctagtgatagtaccagctttagctgcacccacgtttagcttattggctttagtccatcctgtttttgcaaactcatcgttactaatatactggacgatgaattcacgaacgttagcaccagtaccacgagtccagtcccattcgagacgaacgtcaaaacgctccataccatcttggatgtgggcagttttgaaacgcaggttagtcggtgctgacggaggagtgaagttgtaggtcagattaaacagtgacggccaggtatcgtacccagaaacgtccacagtaacaccgtccggcatagatacaacaccggatactcggatgttgtatctaccaactggaacaccaccaaaaatgatctgctcagtgattggacccctgtagtacttagtccaagtactagagccctctggcctcatttcgatggtgacgtattcggcctcaccggatagctccacgacaaccataggagcaccaacacccacgtcaacagattctgcaaaagaagacaccttggtgatcttcggagcagttttcatcttaaagttaacggtgctagagaggttcatccctactttagcagccatcagctccgcgtcgaccattgagtcgtagaaagcaccctgaacagcgtaggtagcgccagcagttaaattattaatagtggcaatgaatgtatcaacgccggtaaaatccctacgggtggttaccccacccgtagttagccagaaagttctaccaattacatcgtaatcggagaagattgagtgctgaatactcgcaatcgtgtaaccggtcacgatattctgcaataccatttgagctggtgctatgtttgaaatcatttagatatatgcccatgcaaccgacttctcgccctttggtccctccgcctgaattcttggctgaagtgctctataaatccccaaagtgttcgagttgttggccttgtagtcgagcttattgtagcccaacaggtagctgtaattatataaactggtgatcttcgcggatctaagcagtttattagtgttgtcccttatttcaagcgtgtagaaaatccctgaaatcagcccctcttcttgcagcttatcccaccctaactctaagtcaggtccaacccattctgcagggtcaggagcaaggttaagcacccggaagttttccaccatactaaggtttttagctgagttcaaatctacagaaattgttactggagagctacgacgaccattaatatcaacagcacggatctcgaaaatagttagtccagcaggttcacccacaatatcctgatacatcttaacattaggggtaaaagcattctgctgcacaatataaggatccacacgatctgatttacgtatcgagtaatagactacgttaggcgttaagctaggaagccatgaaagctctccatttttaccaacatcccctaccattcctcctggggtgggggtgtacttaaactctctcggaggcaggacgttattagatatttcaggtacgctctcgctactgttatctacctgcgttgagttaataaatacatcctcaccgtattcttgaagagttatgtttatcttaccatctcttgtgttttcaacctcatcgactaagaagaacttcttattccagccgtaccgatcgtaggtgaatactacaggatcgttgggttctataccaaggaatttgtaaggtaaagagaagctcagagaacgcgaatagcgagacttcttaagctccctgtccgccaaacttctggcagtgtagtagttggttatgttagcaaaagaaagttgaagtttcttgtcaactccacgatcctcattcttaaacttagaattatagaatgttatggagttggttttccagttcagggtaggatcaatcagagacgcctgaactgagttgtacttattacggcctgtagtatccgatagctccaggtccccataagtatctagaaaattaagttctaacggagtttttgaatctttctctacggtaatgcggaaaatacctgacaggttattcaacgccccttggaaggattctaatagctcctgcacgttcttgaacacagagttggagttatccaagatcgtgttcatttgcattatttgtctgttctcagcagtccagctctcccatccaacgtatctccagaaaggttgccaactagtttgataagaggtgtctataatatttaacagatcggcctcttttctccagtcaccaatcaccatcctgtctacaggaatacctgcaccaaagatagtggaggtcaggtagtcgaatgtttgccatacgccattttggctggttttatctgttctaacagaaccatctgcctggtatacttttactttacgtccgcttaattctgcggatacttcaggaatatcagttctgttctcggtaatagtaaatcgtataacagcgtatgcagtatccagtagtttatacctagagtcccaatactctggtccattaccgttctgcccttgaaggaagaaattgttagcagcggctatatctctcagtacagtggctacagtttggtcggccttgccatgaaacgtccagattcgtatatctccgttaccatcgttatatttatattcctgaccatgagtggagagagatgttgacgggagtcctgtggaaatccttgccatagtgtctcccgatactcttttctgaccgaaacaggtacgtgaggtactatcagtttgatcagtacagatcataggggcgtccccaaactggaagtcgaggaatccttcaatctccccctcacagaacgcataaaccacatacacaacgtttgggttgtctctttctgtatccgcaaaaaccgggatgccgggaactttttgagtaccgtatactacaggaataaacttggctgcaaggttgaagtccaggtctacttctttagtaacagtctcgtaatactttttaaggctgtagctcttggagagaccaaataatttcttcttggattctagcttgtatcgttcttcttttacttgatatttagctaggaagttaacacttttgttggcatggaagaatccgtagtcttcttgatattccggtcgtttggcaccgtgagacggtaataattctccatttacaatctcaagcccgcggtgagaagcgtcatctgtgaagcgtccagcaactcgctcaaaatcgtagaattcgttagaacagttccaagttataacagaagtaccaactccggatactgtattgctttctttaataccaccacccacgatcttacccctgaagaagagtaatgggccgttagtatctgggtccaccggaaggatttccccattgtcgtcgatgatcgcctgatatatagaaatagaacgatctaaaaatgatacgccactttgcactagcttaatgacttcgttggcatccgtaccggtaacactgaagttcaaactaccgacggttaacgtacggttttgtttgtgactgctgattgttttaattttccctgattggaagagtataccaccatagttgatatctctcatgtagtccgtcatataagcgtaaacagcgttattacccgtggaccccgggagttcgatagagacaagatacgctaatcgtatcttgtcattgttggcaaggtaggctttcgcagaaggaaggatctgtctcatagactttctctcagaactaggttaaccccgtcgtatacaccatcaactgtgatctcttcgctgaatgaatctccgttcattaatttagtctggaaaagaatcccattgaaacgtggtctctcggagccgttggtagtgagcaacagatcagggtatagattaagtgtccatactcctgctacgtttttaaaagatgtaatcttatacacctttggatgtgtggttaactggaataaatcaccaggcttaggctctccagatagggagctcgtattggtaataaccagtgtggagcccttttgtccagcggcaatgcgacagttgttcgcatcccctctcactcggtaagactcatagtgtgggagtataacgtcgagatagcctctggtacgcttatactctagaattgctgatgaaagtacagcatactcatcgggaaacatcacaggataactaatgttaagaccccagtactgagtggctgttttaacttcgttaaccttgccgtttggtagctcatctctaatcataggatcgttatcgatcagtgtagctttatcaaacccaaggccgttatactgaggatgtgtaaagggatctggtaatctcatgttttgttttctcctctcaatgttaatattatagtcatatcaagaaaaattttcaagataattttataaattccaaaaagaagggaggacaattacgtcctccctttagtttagttaattcaggttctttaagctcagcccttgttcattcaaggctaactctacagctgcctggaatgccgcaggattttccaatgcgtactccataaagctcttagcgtccattgcctggatgttcagattaaccggtcttctagcaccaccagaagaagtttcagaagccactttatccgctggagttaccttggtaggcaccataggagttgcaacttccgttccgtgttcgcccatcttataggagacacctgggtaggtattaccaccttctgcacgggggataaatccgttagcactacctatgcctttatcgccgcgaacgtaagatagttcacctgcgtttgcgcccatgctaacatctacgtttttctggcgctcacctaaggttaggtaagaggcggtttcaccaccagatcctgctatatcggtcattccggtagcactagatgcctgagctagagataaagcacctgcaagcccagccgcgatcatcagaggaatagagaacggatacggaacagctgttgctgcctgcattaccgctactgctgtctggataatgatttgcttcttagcagattcctgctgaagtttaatcttctccgcttccatctttttgatcttgttcttagactgctcagatttaccatcacgcttctgctctgctgcgatagctgcatcgattgccgaaatttgctggttagtaccgtagctaatcatctggctgactgtctgcatacctgctgcaatcatggacgtagtatccagagatccttgagagaactggatcatagcgttagctaagttccccatactttgagcagtagcagtagcctctgagtttagctgagagagcttactgatagctgtatcgtatgacgccatctggttctccatatcggcgaatttcttatcctctccttccaggccagtagtaggcgtgtagtctgcgcccaatgactgtcctacacgatccatcatctgtgcgttacgctgagctttgagggctgccatttgagcaacagtatttgcaatctcacgactccaacgtgcctgctcatcagcgttacctttagtgaattccttcatttcctggtagaacgctaactgctcctgcattttctgcgattcgcccattagaggcttcatgctttgattgcgctcgaattcctctttacgcatctcagcagttttagcattacggtcaagctgctctttccagatttccctttctatcgaagcaatgttacgtctagactgttcggcttctttctctttatcagcctgagtcttcagcagagctagtctatctttctctacctgtagatttagtttaaggctcgccacgttatactgggaatctgtcatagtacgattagagagtagagctatctccctgtcaataccaactatcttatccttgtagaacttctccttcttagtagattccatgccctggtttttaatcttgaactcttctgtttcgagaatagttagttccttttgtagggctttgttgtccttattcgtagccagtactgcctgcagagcagctttcttggactggagctgttgtagctctagtgctctacctgcttcttccgccttatccttattacgagtagatgcataaacatctgctatacgtttttccacttccagcttagatttggcttcgtcccccgcaatcttctggtagttggtcatagccttgtaagcggtgttcatttccgttacagaagagtacccaagattcaggtccttagttaactggttagctttttcagtagagcctcctgctagggcttccactgctttaagagcatcccccagagctgcggtggctttagccgccgtgttagaatcctgtgcgaagttttggatatcgttacccaagtctccagcagttttcttaatattgttgtactctttgtttatggcaactgccccacctagagcatctttgttgaaggtgtaaatcccgtcacttgcttcgacgttctgcgatatattaagctgattagctaggttagggtttcctttctgcgttttagctagtgcagtgtctctagcgtctctccacttctggatggccccagatgaatcctctagttcctgctgcaacttatatgcttctcgtcgcatatccgcagtttcttgagtgaacctcttgttagcctcggaagctcctaaagtgaaagagtttcctagaccctggtagttggcactcacagcaagtttagtagccatgtccatcttagattcgcgctctaagatatccttattaagggctgcaagtctcttgctggcttcttccttagcctttatagcgtcatccaatcctttctgagatgcttcgaggttcatcaccacggcgttgttatctttaacatccatcttgccgattgattccttctgagcttctgctgctgctgaggaaatagaggccttagaggaataaaacgctgcgtttatagacgcaataacaggtccgagatacttagctgctgcctgctgaaccttacgtaatgcagagtccgcgttcgcagcaaactgttcccaaggggtagcacgcagtgcatcgtcaaggtacccgaaacgcttagtagattctgctacaactgcgtttgcatacgcttgctgtttctggaacgaggatagactctgtatgttataagtcatacccgtgttagctgcgtttagttgtttaacatgttcggcgaacgcatcgttcagacggatggttacacccagttcgtccagaagttcgatttcctgcttagacacacccttgattacacggttgagtgcatctgtcatgtcaacacctagagtggctgcggccctacgtgcaactagggcaaactcaccaatctgtttagaatcgaaaccatatgcggccgcagtagacgcctggcgcatagcctcttcgaaggatacggcataaccagtagcttcctgcagtgcgattgctagcgattgaattggtgtacctgtcttagcacctacaatagaaccgaattgctcaagacggtttagctgatcccccatctttaactgatcaaaggctgctttcagtacgtagaggttagatgctaatgcaccatataagagcggcataggtccagttaccatagctagagctgcgaagtttcttgtagccccacgagcggaccccgaggtattacccagcgctcttgatgctcttcctgcagcgctaccagtaccggttaacgtagagtttagaccacctagtcctgtatttacgtcccgaacccctgcgttaaggtcggtcagcttgtcggatactttgtctgtgcttctggccatatcagacatagtggtgttcatcttgttacccatagcgtcaatagcagctactatccggttcatctcagctaccatagtgcccatattaaaacctgcagcaccaccgccaccacccccagtttgtcctaagcgaatgcgttttgcaatcagcttatcgattgcagcagcggatctaattgcagccgcctctattgcatttagctctggaactactttctggaagttattgatcatacgggtagaggaagacgcagatttagtagccatatcctggaagcccttagagaaccccctctcaagtatttgggaggtagacgctagcttggtttctaaagcatttaaggattgtgtaatggccttaaactgattaggtagctgtagtactcctcgccctgcttgaattttggctaaagctgagtttacctgattagccgcttttaccagtaggttgagctgtgggataacgcctttcacagagttacccagtgggtttagcccacctacactgctcatagatgcgaaagccctgcttaactgtcctagattggcctctatacccgataccgaggcttccagatctgctttcagcttagtcatggatgcaccaagtttattaacggatgtagaagtattagccaggttagtacctgctttgatcttagagagcgccgaagctgcctgattagcgttggcagaaagctcagctaagattttgttaactttgtctaagtgaggagacgacgacgtcatcgcagcagtaatatcaacacccattttattagcactagtactaatattatttaactgggatgtgatccttaacacggacttcgctagtccaacctcaaactcagtgaacttagtccctaacataccgatagaggaggctagggttgttaaactagtagttgatgctagtttctccagagatttctgagtcctagataccgaacgctccactgtagtgaacgttgcagggagcttgcccagactctggttaagcccctcagaactttgagtagcactctccaaggaagcttcaacatccctgatctgtttagcggctttggatccaccacgctgcttgatgtctacaagtaactctcgtattagtctatctgtcatgattttttccaataaaaaaggcctagggcattaaccctaggccaagcctcacgtggaacgcccgttggaggaaaatgtaactcactatctgctagaagacttcattttagacttcttaatagctgcttcaacacgtttgcgagaggctgccacagcatgtgagtcgaatatgttgatgatttggagtataagactcttctcatctgggtcctcgacaccgtagacatcgaagaaaactaaaagggcactcttatctttacctaaataggttggataatctcctggaatataattatcagataagttattatatattgtaagagcagtttgagcgatttcaggaaagtcgtgtatctccacaaaccgtttgagaacatcggggttgggttcctcccccaatgattcacacatcgttagatactgctcttttgttattttggagtctcctcctttaacacatcgttctgcgaaggcgtcaatctccttaagcagtcggttcctgttttgagtcacgaaaagtgtctaggtggaagacggtgctattcatccaggtttcgaaggcgctagagttacgtaccagcattacggcgttgtcgatgctgaactctactttatcaccaagtcggtcttctggcacgtcgatgagcatcagtttttcaacatctgctaccgtcaggccttcccagccttcaattgctactttgacgaactcttctgcgaatttatcgtcgttctgaacctttacagcaataccattaacaaactgggtctcctgcgcagcttctagaattttcttagacagcttacgggaaacgtagttaatttttagcttaaagtgcggtaagcctgggtacgcggtagtaatctgtttggtgtccagggcaatgtctttcaggttaatactcatttgttaatctccaattagctttattcggacaggatctgattgctcagtagggactacatcgtaatcgatcttgtacacgtcggttaagtctaggcgttttgtgattttagtggatggaaagtccaccacaatatatttatttctgatttgtaccggtaggcccatatcaggtttaatgttatgcgtagaatctatctgaagactcttcgcatagtacatcgatatcaaagcggatgagttcaattcgttaacgattgccctcctattattataaatcttattgatatcgaataaactcctgtcaccacgccattcacattgctgctggaatgacataccggctgacataagtcctgggagcactctcccattcgaagatacctgaggtaatgaaaatggtagcacctcaccttgatcgagcgtatagctgttgagtgggtggcctacttcctcaaagtatcccgactcgataccaacgtttagcaccgggacactcttatccagagaaaagtcacaggtggtagcaaaacagttatcgaaacgtaagctcgtgttcttgttaataatatatacggagaacattttaggctcaatattattactgaacaagggcatctgatacattccgtctatccctataaatcccatcaactcgaagaataggccttcgagagcattgctagagaaattaagagctagagaaattgaagaaggagactgagcagttatcttcgaataggcgtagttactgcgtctgtgaatcgtcctacgatttgctttaaactcttcgtaggacgttccagcagtgtaatcagacagggcgtcaaatccatacgccctgccatcgtactcgatgactactctagactcccgcattagggagtatagcattagttatccttatggacctgcaggggcaggtttaccatcgccagtagagattagcttagcgatcgaagttttggtgtacttggcagagaagcccaagtaaccttcatcaccagcgtccatctgggacggaatagctttgaactcgatagaagtacccagcacatcgtcagtctcgattgacgggatgttcaggttagcgtgtttagccaccagaacagctgcaggacgagcagtatcgtactccccacctaggatgatcgcaacttcaaaatcattcacagctttcaactcggagaccagatccttatacagctgaatagagccgttagcagcatcattcatgtatgcggtcagagatccagtaagctcgaaggaaccagtgaatgatccaatcggaacatcaacacgtgacatgatgttaggcgtcaggtacgttacgttgttgttcatggtgaaagaaccaccggtgatcggaatattgtaagtcttaccaccaacagcgttgtttttcagcttaagaacggtcagcttgttcttaatgtaggaaccctggagtttagcgtacagagcgtcgttaataccaagtgcattagggtcaaacggctgtgcagacaaggtttccagacgagtaccattaccagaccaggttacccggccgatatcatcgatatcaacgttaacctctgcttgaccaacctggcagttcttgatcacagaccaagcgttgtcagtcaggatgtagatatgcagcatggctagttcgtggtacgcattatctttgaagttaacaaccaagttggtatcattctggaacacaccggtggtacccgctaaattcaccgcggcgcctgttgccagtccatgccacagaaggtaatctggcaggatctgtttacctgcgtcatcatacggcaggatataagtggagaagctccactcagcggcgtttagcgagtcgttaaagcgctgcgaaccacgagtcggcttagggccagcttcgtttaaagtaatatcagtggagttactgtcctgaccccaagagatgtcgtcctggactaggatctcctgagtattggtcttagtgaaccccgtagtaacggttgacacgaagattcgtgtattacgtaatagttgtacagacatttaaatttctcctgagctgtaacttatctatccagtgctcttctcagaggcatataccggactgttacgttaacttgagcaaaaccaaacggggacagtataccctcgtctgtggacaccgacgtgatctgcatgtcagtggcttcagaatcgatagttgaaccatcaggtttcattatagtatattgtaaatttcctccagtgtcaatagaggtttttacatccgctatgagtttctcaagttgcatgttaatatcatccttttctttatcatagataaggataggaatttcaaggtaaacccactgctgtgcagacggcaggtagtttccagtttcggtacccacgtggactgctatataagggaactcattgatctgctcaaacgaataagtctggcgggatacgttcccatacatattagtaaagaactctgtgggattactcccgtccatgtccttcttcagtcgttccactagggcatcagcaatacttgttctgtaattcattatgtaccctgatttactcttatccggtatctagagtggataaggtctcttgcagccttagcgattgcctcgccgatcagcttctgcgggttcctagcaccagggaatgggcgtagggagagtccgcggtaggtagagacggcaggattgaacacagagtaaggcttaagcatatagttatacgtaatgttgaggtcagggttctttgcccctgcgtcttctcttaacagcacgtctttaatcttcaaggaattggcgaaacgccccgttctaaatttaaggggtgctcccgcttttttcatatccttaactaaatattcttttgctacgagttcaagtaacgctctaaggtttgtgtttgagacgaaacgcccagaagcgccagaaatagcaccagcgtaaccgttgtcagcatctgaaggatctccaaagttaacctctactctaccggtagatcgttttcttcctattttggattttttaccagtgatactatttagaaggttatcgataacaccaacgtcaccttctagattaagtgacgacgagacagctttcaaaatagaggacgtccgaacattcagtaggtcctccgataccggcttggtaaatcggaaggataccttgcctatggtgccatctttgtggttatccatagtttccgcactatatatcacggtgttcttagtggagtggctaccaccactcataatgtccagctgttctttaactatctgtcgagctagatcgcccaacgccactatagcctccggtatacttcgattatagtacggatgtgctccggtacaccagatttagtggtattgaaagtaacggtttctccgccaaatgtacgagactcgcggtagtctttcttgacccaatgatcaactaagaagcacgctgctagtaccaagtcatcaggaatggaggtgaagccggtctgggtaaactctacttccatatacccctctggcggggagaatttcagcaagagcgtaccatccgggtagttcttatattgcgacttatcgatctcctgatcgttaatcgtaattttagtgatcgtgctaggcacgggagaagacaggaagtattttttgcgtgctggtttagtaggcaaaacgtctacaacgttagcactatcgtcaatacctaggagctgcgtaatcagagcattcgctgccttgattaacattgggatatttgactctaagtcaggacgtttaaggcctccatatgttctccaatcagaatctgtcatgaattgcatattttacccaataaaaaaggagagccgaagctctcctttagtcggcagtatagccaaattaagcagcgtaagcaccagcaactacgccgttctcgaagaaacgcatcaggttcagacgctgagtaacgtagtacgcatcgcgctgacgttcagcctgacgctctttctcaacggtgattgcacgctgacgaggaacgatgaagttgtcacggtaaacaaccacacagaactcagcacttgcagccttagctgggaagaactcagaaactagtaccggcagaccgtaaatgcgaccaacctgaccctgcagtttgatagcggtggtagcggtaacctgtgcaacgtcctggaactcttcatcttcgatcagatcgtagtaagcatccatcgaaacaaccagagccagtttgttcaggtctagaccgtggcggcccagtgaacgacgcagcttgtgaatttctttagcggtaactttaacagaaccgtcagctttagcagtggtagcaactactttaccatcgtctttagcgaactggatcagacctttcggagtaccagcagcaccagtaccggtcaggaacgctttttcgattgcgatagcgtgagcttcaatcagacgacgacgcatgatcggcagcagagtgaagatagcatcttcttctgtttcgtcggtcatatacgctttagcagccagtttgtaggtcttgaaggtgatttcagacagcttggttttgtcttccgcaccaacagtagcaggagtaccgtaggtagaagcgtcaacccaggtagcttcgccagcttccggctcaaccatcatggtcagcaatttgctagacatcggcagttcttcgaacatagtaccgataatcagtttagcctgaatgtcacgcaagatacgcagggagaagatggtttcgtacgcttcggtagaaacttcgatagaagaagagccgttaacagctttcaggtgggcttcgccacgcttagtaccgaatacatctttctgcattacgtaggacagaagcaccagtttctcaacttcgtcttcgaaatcttcctgcttaccaaacattgccttagcaacgccgtcagctacgaaagagcggctattttcacgagcggccagtagagatttgatttcttctttcagaccagtgatttcttcctgctgggagttcattgctttaacgaacgcttcagcggactgtttggatttctcatccagattttttacaagctccagagcttctgccaggtttttgcggtcttcaccagttgctttagcaaccaggtcttccatacgcttgagttctttagcttcctgctcagcagcaaatttgcgagcttcttcagctttctgagaggcggttagacctttaagctgctcagcaatgtcacccaggcccagatctttagacagttgtgcgatatcgtaagacattattatttctccattatcctttagcgtaaccagcggctactaggaatttctctaaattagaaagttcaggttgttcaacaggctggacctgcgaagattttacaaaagacttgcgaagctccatgtagtcattatggtttacagacttcgaaagactaaaagttgagtcttggttgcagggaaccgagactacagagatctcgagtaactccagatctttaataatgaacgtttcagtcatatcgtcccactcggcatctttaatatagaagcctacggagaacgttttaagaacctcatcacgtatcaatgagtaaatctgtagatcagcagcactaacctcaccctcaaccataagtccggactcggtaggtaccaggtctaggatcttaccaattggtcggctgtggttatggccgaaaagcatgatcgggttcttcataaaattcttgagggcgttacttgtagtccacgcttcggagagaataacgtcgccggcgcggtctttggtaatcgtgttagcataccctttgatttttaaaggaggattatcaccctcaccgacagctttaacagatttaatctcagcattaagattaatattctgcatcgtttgctccaaacactttcgtgttgttcctcagttttcagatactattattacataccaaatcgcgaatgtcaaaaggtatttgaaaatcccatacggtgtgtgggattagtaggtagtcgaaattacttacactgagaataaattttccacttgcacagaaaaatggggagccgaagctcccccagttatcaagtattatacaggctcagtaggtgccttaactgttactgtagcagtgtcggtcttattgccgtcagctgttttaacagtaataactacagtaccatctgcagctaagttggagggaacagttacagtaccatccgcagctacggtagctttggtagtatcagcagaagtataagttacagacttattggttgcgttagctggggctacggtaccagtaagtttgccagtcttacctgcttcgattgtaatagtcttaggtgacatagtgacaccggtaaccgctacaacaggagctttgacctggatagacacttcgctagatttaccccccgcagtagcggtaattttaacagtacctgctttagacagggccgtcactaatcccgttgcgctcacagtagctagggtagcatcactagtcttccatgttacagttttattatctgcgtctgctggtagaaccgtagcggagagctgtgcagtcttagtataatctaaggatgcaggagctcccgagatgctaacagaggctaccggtatcggcttagttgcttctgcgtaggcttccgtaaactgcttccaggttttacggttggttgcagcgtacccgtactccttacgcagaatctggtaagtaagatgtgccttaacggttgcgaacacgttatgtgcctctggaagaccgttcgggaacagtgcttttaatgctttatagtcaatcattgtttttcctcgtctttattgggagcgccaccttcttgtccgcttactccggtagctgatccagctacgttggcagggatgcgaattttcttcatctgctcgtcggccagttcctcataaccaagctctatacgaccttcgttaccagtaaggataccattattgaccagtgcagttacgaatttagcctctttctccttgtcaggagtcagtgctactacgtctttagtattgggcgttactttaaaaccgaagaagaacgtaagcgaactacatactttattaagcataggcacaatagtcatgtagtagaacagctcaatgttcggtcgaatattggcgttattacctccatcgatcagtaattgtgggaccccaagagcgatacatacgtctttattaaaacgagcgatatcgttctcaaaatcgagatccttaaaggaggagatttgagagtaaggcttagccttcatcccaccatctaaaatgagcacagttgattggccggtactaggattatagtccagctgaagctcttcttgtttacgttcacggagctttttatttaagatttcatctgtctctaagataagaccgataaccgtgccgttgtcaaggaacttctccttgaactcaagcattttctcccgcttagtaagcgagttaatcacggtagctacacgagactgacctgtaatctgggagttaataccaccattctggccattatctttgatgaatataatttcatcaacgcggtagtcgatcatattattaaagacgaatttgttaacgaattttttgtcatctgcttttacttccattaaggcagcaggcagatgatacagagacgaaccgtcccaatggatatatgcacatccttcgaatagaaggtcagacactattaggcgtctgaaagtactggagtccatgtaagggttagggcgaacattgagcagcgtctcaagagttttactcctgatcgtgccataggttgttattgttttatactgttcacctacggtgtaggagcactcagcggcgctgtcaattaccatgttcgcggatctgttaaggatctcaatagacgaataggctttgccagtcgtgaatggtttgacgttagtacggtgactaacatcctccaagtccctgattatgcgttgtccgcggtttagtttagtaactaaccagtcacgaatagccattataggaaccttgcgaatcctgatttctcagtcttgacgtcagtcggaagccacttcgcaaagcctgatctttcgccagtattgcttgtacgaggggcttctggattcatacatctttcacgctgtttttcaacccaaatcttctgtttgttagccgaaaacaacggtggttctttcgtatagaccttgtgtagggtctgatgatgaaagacacatagagtgaccgtgtcctctactagctcatgccaataatgttgatagaacttatcccgattacttaggacgacttctgagtcagtgaaatccagttggaattctttagcaaagtttttaactagtaaggccacagtcgagtagtggtgtagctccaggttttcctgtgagtcacaaatggcgcaacagttgcctcttttgtactgggctttgattccgtcacgcattatggagattgcatctctcttatattttacattggaagccaaagtgtttctcctcttagttgggaaaatactacttcgggtacagcaattaaatattcctctcattcaccctgatgtctatgagatctctcaaggtatgaatatattataactgccacacacgaaattgtaaagtgaattttataaagttggaacggaatttgtactcactactatccgttccaactcagctcttatttgccacgggaaatcgagtagatgccgtaacgcagtgcgtcacataagtgagagttggcatcgtgacgaggtttctctctggagagcttttcctccccttcttggaagtcccacttgtagttctggagtgcgtgaattagcgcagtacaagaggcgtcaacaatgattttgccttgctggaatagcgcagctagacatgccagaccatctagaacagacttcttagcaggggcagaggatatctcatgctcatatgctaagtcctgtcggaactgtgcggctgcagagtcaacaaagatacggtctacattataccggtctatacagtgttgtatatacatggcgtgctgtgctgtagtcttctctgcctgctggtactcctcaaggatgtaatatacatcttggtcatagtggtacttaatagtcagcaccgctgtggggtccctataaccaacgtcaatacctagaatggtctcgaactcatggtctgctgcaaagaaatgacccatacctgcaagatcctgcacatgctcggaaacgctgaaggtatcgtaaatctgaccttcgaatacggagaagtccgcttcgtactcctgtttgaagtagttcttagatacagtcttacgtgcttcctcaatatctgcgagagatacgcgaggattatcccggtacgttccatggatcgatacccactgtggaaggtcttctcggaacccctgctcatagaagcgtttgaaccagttaccaccacgaggagtagagataaacagagctttagagttaggtttgtctagtgtaggacggagctgaatatcaaaagcgtccccaccaacgtcggagatcgctgcttcgtcaaagataataaagtcgtatgaacgaccaactgcggagtcagcctgcgcagcagaagccagcttaaagagcgaaccgttagcaagttcaatttctttatctttggcgttctcacgctcagtttgaagcccgtatttcttaatcagacctttgatctgcgcccacccgatgtttgccagggagtagttcggagctactacgagcaccttaacgttcggctctaggagtttaaggaagcctagagtatacgcaatgaacgacttgccaacacgacgtgatacgcatgctgtaacgaaacggtgacgtgggtcttccagtgcgtttatgattgcgcactgcggaccgtttggaacgattccctcggtggccagcaagccggacaccgggaatttaaagaatcgtttatcaacaccaaaatccaccacgtcagtcgtattaatataactacgtgagatttccattacttacctgcccccacaatgcgtgacagaagatcagtgtaattagagtcgtgaccacctgccaagttgatctgagtgttagtctggtgtacaggagctttagcctgcttcaccttctcatactcgatctgcatcttcatctcatccatcttcattttgtgcatgagtttgaggatatccataatatccatctcggaacccattccagtttcatccagttcctccatcttcatggttagaaccgtgtctagaatgccgaagaatttatcacggttacggaagccagattccatgaagatatcagtaaggtaagccttgacctcaggcttacgcataatttcacggaatttaggttcttccatgccaacagctaacgctgctttcgcaacgtcgctgccagactccagataggcctcgataacaagcatgccttccggagacattgcatctggtacaattaaatcattgctcatactgcctcctttaggcaagcctttgcacagcaatcctaacttcaggaagaatcactcgcatgttcataatattaatcatctcaacgttaacccaaacctcaacactaccgtcagctctagctatcagccaatagataatagcgtagtctccctgagtagcagagttagtagtagcaggtgcccacatagccttcatttgcatggcgttgttcccaggaataaccccacactgtactaccgtaccacgaataaagtggaagggtacacacatgttaactggaagacacataatttggtgcacacgtttttggaagtggttaccgaagattctcagtctactatctacctcgctccactgggtaaggtcttctagagggttataacatccaattcctgcagcagcaatccactcatcgtttttccagtctagagtgacaacgcaagccccatttcgggagttattaactcctaaccacaaggtagccaggtggtgactagcattaccactagtacgtaagttacctcctatatcggcaaaggcagtaccgcccactagtctgagagggcgagttgcttcggaccatacaggaccccactggtttccaatctccggcgggttagattttacgtaccactgtgcatcagatctaaaattgtaaacccctacagtggttacatgcatctcactcacattaccttgtccaaactcagcaccattatccggtcgagttaggggttggttgaagtgaacatacccattattaccgacagtagggttgccactaaatctagcaacattggttgcaataaccttgatgtccggtctgttacccgggctgtagtttatatcgttctggtttataaacttccacccagtgttcatcaggtttataccgtttacaataaactctctagggctgattttaatctcctggttacgagagccgaacacatcctctgcgtagaacccctgcccattgtatttcatgttagtaatataccagcggacgcgtttagggacacggaagttgttatccctataaatagcgttgttaccccaaccactaccagcattgttgttatctgtgttctcccaccccataaagttattgggcggaccacggaaaaaccctgctttgtactgaatctcctgataagactcagtctgaatattatgagcgtaggggccacccactgggttagagctttttccatatctaggacccatgtgcccatatatgttacggttgagagtctccccgcgtaaacatatactgttaacaccagtagtacgcatccaaggatggcgcattgcatcagcaccaatggtaagtggtctattgggcggagacacagaaccggctatattgccactaaaagcccccctatagagcacccatccagctttgatgattgtctggaaatttggaggtataggagctccaaccggcggcccaggccctctgtcaccccattctgagttaacgccccaggtgtacatacacccagtaccatcacgcaacttctcgttaatagtacccggagtttcctcaaagtagaagctaacatccatatgcaaatcagcggaagcacaaacgttagtcttcatactagccatagtacctgcagaaacctgggaaccgacagtattactaaagtaggcgttatacgctttagcacctacacccatagatgtaccgtaaatgaaacgtctagtaccatcctcaaactcaacttcagttaagacaactctgtcgtagtctgcggacagtacctgaataatcctatcgggcatacgcgaacagcgataccaatcaccaccgtcccatagcgtaacctcatgggtctctaagatgacgacgtgtggcatgtcgctatggaatatagtatcccaaccattatttaagtggttgttaatatccttgttattgcccgaggttagggagagaaccttcttccctcctatgcgacctgcaaaaaagcccataaaaacctcaaaatctcacttgctaacaagtgacttttataatataatattattataaattaaatcaaccgccaagtaaaccagattttttaaaaccatctaggaggaccactatggaagtagttataggagcacttgttttactctcaatcgtactatttgtcatcaccgtaaagcaaggtaagataatcaaacggctagaacgcactaacggggtgttgcaaaagtcttatgacaaccaaacccgcttgctgcataaggcacagttaaacctgtctgaatgcaaagcggaactagaatcagcaaataaaatctacattactaagggtatggtgtaaacatgactattgtactaattttcacgacattcttcttcctggcagcagtttggtttggtgtgcgagcacatgacctacggaactcggtaatagcggcagatcttcgcaacaaaagtctgcaccaagagatcctccaaactcgggcggaacgtcaagtagcgatctcgaaacaccaacgagtcatgaacgatcttcggaatgacccgagcaacccgtactacatccctccagtgaccccgcaggtcgcgagacgcaagcagaatcgggggaactcgggaaattctcggcagctaactaattcaacatctaactcgggaagttctcggggagatgacgggtcgacagcggcaattatagctacaaccgcggcagttgctacatatagcgggtatgactcgggaagttcttactgcgatagcggcagtagtagctttgattcgggctgttccttttaatactccctttagcctttcctccaattttcataaagttacacatggaggtgggcttagagggtcggggggtggtatggtagtccgattacccccctagctaactattagtaccctaactatttcgctagggtactattagctttcttatgatgcgatggctaatgattgaatgaattgttgcggtttgacgccataatcacttctttcttcttcggtcataccttcccagcagtgggctaaacgctcgcaaagatattgataatcattatcatcatcaagcgcctcatctatgaatgactcaccagcaaggcgcacaccaatagacagaatgtcattgattgcggtagcgtccatcgtttgaaggccagcagcagcagcagcggctaacactcctttgttatcgtcaatcatagtgatcgtggcgttcgggtattcagctttaagcatttcgaaataatgcgttttatagataccatctttcgaatagtacacctctttataatcggcatcaccgatatagcgatgtaatacatcgcgggacaatatctggatattaccaccacgaccagcgcgaatacgttgtttgcgtaggaaatagtaatcgcttttgctcatataacgagcggtaacaacgatgtttaatacagtgggatcattaagcgatgcccgcatatattcaaccaaaggtaaaagggtatcggtcataattgcatcatgtacgcaagccttttcccggtacatgtttaaatctaagttccctttatcatccatacacgggaacacacgggcaaaggaattaataacggttccgtctaaatcccataatttgatcgttttgattgccagtttattaaaagccattttcatttctccggtttcggggttgttggtaattaatcaagcgagctatattataactcgctttgttaattatcagaagaataaagttaaggcatcagctaattcagccggtttaatccgagtagccattaccgggacaattgccagcggcggcgtatattcgctggcggtataatccattacatcgcctaacaggtaggtatcatcataatcattttcgcttacgacgataaacatcagaccagcggcggcggcgtcaatctctacgatctcgcagatatcagcctcatagagaatagaatcagcggctaccagttgcgacacaatgcccgattctttaaattcagcggggcgcgggaggatagcggctagagcttttaaaaccgtctcgccgtctaccgttctaactttctgatagctaacatgcgggcgcccttcgctatcgcgggaaataacaaggctgttttctacgacgttggacgcggtgaaagatttacggttgttatagatgaaagtaagtttcatttgtttctccagcttatttatttaggggttatttattgccgggatattctcccggcttttttattatgcaaagaaagcgccgtctttaaagtcaatcaaagtacgttgcccgttttcataggtgatcagatgagtctgtgaccagctagacgcgccgatgttgtaacccatatcaagggaaccagcgacgccagcagtataaacgccgccgtaaatgctaggtgtatgcgtatggccagtgttcatcttgccgagcttgcggaagcctttcggattgccgcgagcgccgttaatgccgttgtgaccgtgggaaccgcattcgatgcccgcgattttcatcgattcgtctgtagttaagaagatcgcagcaaaatcgcaaccagcaacattgcgcagggcataatccagcacgttaaaagtatcgtccttgttttcgattgcctcataaatcgcggcattcaggcgataataaagatgagcattcgccgggtcttgttgaatgttagctttgctatcatccagccagcgagaaagcgctagatcgtggttggattcaacaatgaccgtttggctaaattcacgctccatttgctccagtacgcggcccgtatcaatcaggtcgtcaattaccttgtcacgtccggcggcgtactgtttcgcaaggaaaacaccactagcgcggttatgatggttgcgtgacgtgaaatcatgcacatcatgcacaatctggtaacgagggcgcaggatatccactagcgcggtttcgctagggttatattcccagcttgccgccgcgacagcgagatccagcttttcggcgtgaatgtcaccatattgcagcgcggcaacgtggcccgttacttcttcgccaccgttaaccgtaaatttatggttaagatcgtaaaacatcccgctttcgtccatcgtctcaagctggcgagcaaagaagttgccgttgtcgtcgatctctaccagcaaagcgccatagttatgcagcgcttcggccttttggcccgctttttgctgaatataatttttcagcgtcgccgttccggttgaatacatacggcgcacagtgtcgcccttcattgccgggacactttcggcggtgattttagcgtgaccgatagccagccctttcaggccgtaggcggtcgcagtctcgccaaagccggacagcggaaaatcagcagtcggcagaatgttaatttccgccatgaatgcaaagcctgtttcacggttgcccaaaaacacgttttcatcacaaatgaaatctgagaaagcatcatcatatttcagttcatcgttgccttgcccgttttggaagccttttttgttgtaggcgtatttgcttactaacagagtagcaccgagatatttcgcggcctcctgtaaggttttccagaaattagcatgagggaacgtattgttttgaatcgaagtcaaaagaaaacggcggcccggaattaccttccagctttcgacgctagagttaagctgaccagcggcaacggggcgggaatcttccaccgcaacacgttgggcgcgtttttcagcagcaggtttaacaggcttgttattatccagccaatcgcaaatttcgctagaatgcttcgccgtgccgtaatgctctttgctcaattcgtcgcagatctccagctttttagcgcgcagacgtttaccccaaaagttgaggttatttgcagcggttaaaatagctttctgtttctcgattgcaatgatcattatctaaattctccagttaatgggatataggcagaattgccaaatataacgccttgttgctggtggcgttataatttgcgactctaaactattgcaggaataatactggcggatattccaaaagctacagctagaataataaagattattgaccagcggcggcaaatactcgctttcttaaaccagaagtcacggcgtaataaatccgtttgttcgctgcctatttccatgaaattatagtatccatagagacaagcggcggcgaaaaagccagcgataagaattaaggattcagtagggaaaaagatcattttacaacctccttttcttctacgctgaaagcgtagttaagaaggtaaatttcgcgggaagataattccagcatttccggcttaaatacttcgcggttaattgccatcccgaaagtatccgcatcagggttaacccacaaaacaatatattcaggtactttaacgcttgggggcgtcataaccttattatcctgataacccgtctggattaattcatccacgacggttcccgttaatttaataacggcacctttaattaaagccatttttatttctccagttatgggggacaaaatatttaattatgcgccccgctagggaggcgcattataattattctgccgactcttttacttcgtcctgaacgccaaccatacgggcgataacgtccagttggtcgagcttcatttgttccagacttgccaaaccatcggcatcatcaatcaggccgtcagcaatggcgtgctgagtgagaacgcgcacatagtgagctttacgcagggaggaaccgccgccgactttgcgcggcttatcggacttctgataaacctttgcgctaaccagtttagagcgcactttaacatgcgattccgcgccgacagctttcgcaatatcgataagaccttgcgagttggctacctccagaccttcggcggcaataatgccctcatacatagagatcgcagttgcggcgttggcttcgttccatgcgaatttttcggttttagtagcagtcatgatatatctccagttttatttaagggtttagaataactagaatgttattcctaataagctgttaataatagcggttaacctcatcaccgtaatattccggcactatcgttaaaagtattatacagcttattcagaaaacactttaaagctatttctttcaaaatatattagcgcattattcgtcgctttattttgccgctcttaattgccgcggtagcatgatatgtaccgtcgaaaagatatattataaatataccggatcgccgggtggggcgatttaattaataccatttagccgttaagcgacggctaaccatttatcatctttgcgaatgactttcaccacgtcgccggaatctacccggacgctgtaaattttcgcgtcgctgttttttgctttttccgtttcggcgtataccgcgttgattttatcaaacgggatcatagccgcccctttgatatatccgattttttcattttcgcccggcttacttacgtcgccagtaacgaaaggaataaaaacggaatcaccgatcattggggttttaacgttttgcatgtttcttactccagtttagtttattgggttatccggttaacactctgatattctagagtgttaacagaaaactcaatctacccttactgagagaatcgacttttccaaatttttaaagagcggtgttgcttattgagattctataataaagcgttatcggcagactgtcaagcgttattttgtaaagattttaaataacgcatcatgttatcccaaatcatcggcaagccttgctgacctccgcgctggtaagagcggtaacgccgcgccatatcgcgttgcattttgaccagttccgaacttgccattttgttcaattttgctgccggtttagatgatattacaaagcgtttcatgttgtcaacctttaattagtggagtgtatgatttcgtttagtttgcataatgatttgaccgtctttatgaatgaaggctaaatctacgtcgtacacatttcgataagtctctatgaaatgttcggcgtctgctactgtgaactcgtttacaatctcgctactcattacgttttcttttaacatgttttcggtttccttattaagtaaagaagccgataacgctttttatagaatcccaaattgttaaagagcagtgtagggcggggacagactatctcgtttcggcgtttcctttcgcggtagtcggggcaatgttgccgcctccagatacctaactactagtgaaacgctttcgtgtttccgtttcgtcttgccgccctacgagataaataatagcacaatgacatttggccgcaagcggagaattgtaaagaagcgtaaagagaaaacaggcccacgatagataggaaacgcacgcacgtgacacaatatttaaagaaagtcaacgaatatttttactatttttcttcaaaaggggttgacaaaacctatttcacacgaggtgaggagatcgcctcatacccggtatgattcatcggcttttatctaaaaccgcttagaatcgattctagagcgttttagaccctgttaataacttatacaaaaagcaaaaatgaaatttaattagttatccactagacaaatgattatttttatgaaaacgcgaaataatgcttgcgtttattttatgctgcactctcgttttcctggcaagttatccacagcacgttttgacttgacaagctgagaagcggtataacgagatatccccagacttatccacaggttatcctactgtatatttatacagtatactccggcagcggtaatactctaatatgcctctagaacgctctataacgcatcctaagcgctttaaatttagaagccatattaaaggccattgctggaggggcgcagaaaaataaaaagcccgctcattataagcaggcttttaattcgttagctaatgattagcgttgctttaaattcaaagttattaatttcaaatgtaactttttcggatagtgaatccttgtttgctactaattcctgcgctacatctattagccagctaaccatttgcggcttaattatcacgttagcaactacttcccggacaaaatgagagaactcataataactcccctcaatagttatcaggctattaattaccagcttataacgtttcattatcggagtaccgtttcaattgtttcgccgctagagcagactgacccgccgcgataaaacaggcgttcggttttatatttggttagcagatcatagagatccagatcatcggaaagcgggtaagattcccccagcgcggaaacggaaacaggtttacccgccaccagatcacggcaaatcagaatcagcaaaggccagctaatattgatagcatcgccccgcaacccaattttgagggtagccacttcgtcaatatgccttgcattctggcggctaacgtattggataacggtttccatcgttttatagtgggccagaaaatatttgttgacatagatataaatcataggtatacgaccccgctaaccttccaaccggattttaaaccttcctcaatatgaagaatagtttcggcatccgggatatagataaacgttttcagttcacgcagattaatgactgcctttccgtcaactatctggatatagcccaaatagattgcccgctctagaacggaatgaaggggcgaaccaccattaacgaggttgcaggaatgaccgggccagtacatataaaacgacccttctaccccagcattcgcgtatttttcgtcgccgtcgtcttcgtcccaatcatcctcgcctaacatactttcagcatgttcgcaagccttttcccaggaaagggaatcgacgtcaattccacgacctaaaaaatgaaggtcagtccaggacgtaccgcaaacgttagtatcacatttgaggacagcggcgacttcctgagactcaattcgcccgccctctaaatataaaccttcttccgcttctaccgtacaattaatgcccggtacgcaagatttcacatgaaacatggttttctccaataatgggggcggctagagattttagccgccgggaaggggattttacagcttatcgcggaaagtatcaagccggttgtttagctctttaatcgcgtcggcatggatttcgtcatacgttgacacgatatccgccagctcatccatagttagcgaactaacaataacggacgttttcacctccagcttttccggttccgcttccgctggtggcgtttccaaaaacgtcagtgatcctaaattaattaggaatacttcgatttcggtagcgccggattcgcagtctatttcaaaactgctatccccaatacagatatcaaagccatagccgtataccccgataatccgcaaggggattcccagcatatcgtcagtatccgggtaacaatcccggcggtcaatctggcgggccagattatccaagttttttggctcgatgaaaatagcaaaattgccacgatcgccattctggcgcaggcgttgccatacattagcgatcgtcatcttttcgccttcgaaagtagcggttagccgttccataacgttctccagttagttagcagggtaattattatagcgccccattatagaggcgctagggataattattctgctacgtcgctttcaatcaggctagagagattgacgcctttcaatacttcgtcaatcatttcgcctacattgaaactttgtaccagttcaagcatagcggcttgcattgcagcatccgccgcaatcaccgccttgcggttgttcggcgcgtactggctaaccgcgaagttcagcaggttagcaattaccacacgacctaccgccgtgtcaacataaccgcgaaccataaacggcgctttgctggcggcgatgccagaaacttttttcaggacgatagaaccagcttccagtttggcagcgtttacagcagcgtttttgttagcggcaacgatagcggtagcggtagatttgatagtattcatttgtaatgctccagtctcaaaattattagggttaactacattttcagtaacagccggggcgacttcttctagctcgccatcataacgataatttccagtccttgccccttcttcgatatcaatatcgtaagggtcacatggtaacaggatgcttccgtccttgtcaagcacaaaaatcatcatttcgctagagattcgtgctggtggtagttccagatgatcgcacagatttttaacccatgcgcgggcatcggtgaaagcgagcagttcgctttcatggtagcaaaaacgtctcgacgcttgcttaccttcggacgccttatacaaataagagtccgtagtggtagacactatcagatcaataggctggctgtcaaccaaatattgatcatcgtgataaataacaatcgccgcaccgggattggctagaacgtagtcacggcaacgctcaaaggcatagccggatctactttccatatttgcgcgataaacggccaaaatatgaccaatagaggcgcacttactgccgtctaacaggttgcgagcgccaccgcgaaccatcggcaaattagcaacgggggtaaatttctgtaacatcttctgttactcctttgtttggctgagaatctattatagcaagattcccagctttttagcaattattattttctagaagcagataccacggccccggcctacctcatcccgattttcatcgaaaatgatcacgttggcattgaacgtgctacggttaacgatcatctgtatgccgtccttgcccggttccggttccaccataaatccccatgtaccggagtcaaccgccacggaatcaaaatcctgattccgtaacactgccgtaacagtaccctcttttgcaaaggtcacactgacacggcattcaataggccgaactttttcaggggtaacgatagccggggcgctaacctccgcaagcgcagcacctgaaagcatagcaaggccaaaaccaacaatagcgagtctcataacattctccagtttttgggggttgttcccgttcaagagatcgcattatggcggaatcaaatttgattgtctactactaaaaatagtagttgcgtccagctagggttatgttattattactactccaaatagaggagatcgaaaaatggctttttcaatgttggcgctcggtttagtcggttctatgatggttttgggctttatcgctttttgcggctatgccctctatgataccttgtttaataaggaggctttttaatgagaactttgcgcggtggtagtcccaagagccgtagccacaatacttaccagttgaacgttattcgtgatggtcagaagaaaggcggtgacggtggcggcggtgagtggggttttcgtgtcatcatggttatcattatgaccctaatctttttgcagagttgccaatgatacttacaatcctatttattagtctgctatgtattctgcccggcttggtggcgctagaggtctggtcaagatcaccggttgactccg

SEQ ID NO: 30 - DNA, 159052 bp, Unknown
  KPL6a-30  (node_1_20dec131_l_159052_d_1.00x_circular_true)
ggttaatctgtaaaggtgaaattatggttgaacttgatgagatgtttagtaaccgtgcagtggttgcacaggctctttcggaggctcaggagatggccgtccagactgatgatggaaacgggggggaacttaccctggaagaccaaatagcatttgcacaagctcaggagtaggtattctgacagcttataactggtgatggtaatcctgttctaaggatatcgccgcaatggtttaaacaaagccccttcgggggcttttcttttgaacaaactaaatacaaggagacattgttagaaaaacaacatgaggaaccacccatgaaaacgcaatttaaccaatcacaaggctcgacttcacgcgagacgaacaaagaagcgattgctcgtatcttcggtttgaagaaatcccaagtcggatatctgtcaacaactactccaattgattcttatgtcatactgtttgacaaagaaactcagacttgttggtatcgaggtacagcgactggtactcctgtcagctggactgtaacaaataaattgttgaacttaacaacttctaacggttcatatgttcttgtggcagggtattctggtgatattcttcgtcaagacctggcatcaagcgaagatggtttgggaagttatttggttggtgcggcccgtaacccattagctgcggctatatctacagctatttccgttgctacggcattaagttcaataagtgtttctatctgggagttcagaaatcatgttactgacagacctgatgaagaagaccaaaacacgtgggattggtctcctgcaatagaggctgcatttaatagtatagggacttacttgccttatactatggggactaacacccgtcatgcatcagcaacactactgtttcctcctggatactacagatgttctgaacaggtactggcagatttttcatcgtattccgggtatgtatatgggagacctcgcctcactattactgggtatggtgcgtctattggttgtggcgtagagcagaattttacatggaaagttattggcacattactgaacatgagcggcctggattttgttacggaccccactgttaactactcgtatgcaatgaaactcggagatgaaacgaagacaaccagtaattatgctgtaactggtgttttacgcgatattcgtggtttcaacctgacaaaatttgtaactttcgcatgggcttttgatatgcgtattgaggggccttacgcaacaggattcaagcaagatcctgatgtggcggaacctgcaacatactttgaaatacttgagcatgtatctgataactgtaaccatttagtttttatcagacctcaaggtgaaacagctaataccaaaaattttgaatattttagaattaatggtaactcgcatttgtccacccaccacaacatacatatgtttggcggtcattttgagtctcaccaatatggcattaaatttattaatgctgtaaaaaatgcaagcggcaggcctgccgtacatcagtgttcgttcaatggggttctgttcctggagaatggaagtggtaatgctgcactcgatgctcttactccggcggcaagcactaacctgcttacgcttgatcaagcctcctgcattgaattaaattgctgtcgtgttgctacaacaaacagtactactgagactttcgacagttccaagcataaggctctgattaagtattctggctcagcacttagccttgtcatcagaggtgggtattttgttactgcattcgccagcgtagctggtagtaaccaaaatagatacacacttattgatataagtgagcactcagcaggcaaacgtgcagtagaatttgcaggacgttattcaatgaataacttctcaactgcacatagcacaggaagagtgctatcaggttggacatctggaaacaggaaatggattgaagaagtttctgatgacggccttgaatattcttggtcttactctacttcttcagatttaacaggaacacctactaaaatatttagtgttgatagttcaggtacattttctgttaatggcatcaaagtcagcacatttgatgcttcgtctgtcctacgcattgggtacaataatacaaccccaggtcagcgaagcataaacttctatggtgctggtactacggacttgactggacaggtttatggtaactcgtctggtagtataaccgtaacatctacaaataatatattcttagccgctaacggtgggtcgggcgagacgatgtacacggggaatctgaagcctaacgcaacaggttcgtacagtttaggtacgtcgtctttttatccaaataatatttacagtcagaatgcggtaactgttgtttctgatgtgaactataaggcgaatgttaaggttctttctgaggaagaagagtaccagaccttaatttcagccgtaggaagcgtaccgttcagcgcatggcagttaaaatctgcaattgctgagaaaggtgaaggctctgctcgctggcatgtcggggttattgcccaacaggttaaatctgctattactgatgccgggttggactggacaaaatacggcttgattacatatgagtcattcagtcaggaagtaacaaaaggtgatgatggttattactatcctgttgttgacgaggaagaggcgtcggaaatcccagttaatgcatctgggtacatagatgccatagacggggcggacagtgtgatcactgctgatgatggagcgattacgtacaccagggagatttacatgctcagaatggaagagtttttcgtactgcgaatggcatatatcgaaagcaaattatcatgacgtggtccgtcagaaatggcggagtgtcaattttgggtgatgttatactttaactaaccaaacaaagccccttcgggggctttattcttcatacgatgggttgtgtggtatactaaataattccaagacaaaactctatagatggagtacaaaatgcaacaattgaatcttaaccgccgcccttattgggacgactggaatccagagaagcgtttcagccgcatcctgttccgcccgaatccaatcaaagtacagactcgtgagctgaaccagctgcagactatcctacaggatcaaattgagaagattggtaatcatcttttcaaagatgggtctatggttattcctggtggtctgacaatcaccaattccgcagtttctatgaaatttcagctggcgggtgggagcgaattcactgacctcgaaggcattcaagaactgtacgtgattggcaaagacaacaacgccaaggcccgtgtattgtctctggaacgctacaccagtgaaccggatatgatgttctgtatcctggaaatgaccgagtccggtactgccgatggattcagcccgaacgataatctgtacttcaacacctatgatgtgaatgataacttcatccgtatcggttatggtgttgctcagactgtcggtggttctattgttgctcggctgaccaaaggcgtctatttcgttcgtgggttcttcctcgacgttgacgatgatatgttggttgtcaacaaatatgcaaacaacaccagccatcgtgtcgggttcaaagttactgaagaaatcgtgactgaagagcaagatagtagtctgttctccaatgcccagggtacaccgaacaccaaagcgccgggcgctcatcgcttgcgcctggatctgagccttcaggcgttcgattatgacgcagaagtcgaagatttcgttgagctggcgaagatcaaagacggtaaaatccagtctatggtcacccaatcgacgtacaatatcctcgaagacactatggcccagcgcacctacgagcaagctggtgactacaacgtgtctactcaccagatcgaccttcgtgaacacctgaaagaaaacaacaatggtggggtttatactccggccgaaggtggcgatgaaagcaaactggttgcggtaatgaaaccgggcatttcttatgtccgtggtcgtcgtattgagaacgtcggggaagaactcgtcgtaattgataaggcgcgtgatacagacctcctgaacaacacaccagttgctgtagcgacaggtaatttcctgacgaccaagaactctaaaggtgtccctgttatcagccgtagtattcgctacaaattgctgaatgcttctggtgtcacccaagcgactgccctgtgtatctccgccgatcgtaccgggacggaattccgtctgtatatgcgtgacctggtcgtcactggtgatatgagcacggtcaccaaagtcgcttacgaagaaagcgggaccacgatgttttcggccgcgctggaaacaaatcagttctcacaaagttcatctatggatctcatatttgaactgcctgtctttggcgtgaaaactctggcaccgaccgggacgattgatatcaactacaccgtcttgcggtcttacaaaattacgctggacgcatcaggcaatggttctatatccgcgccgctgggatacagcttttctccggaattctcactctactccggagcgaaatctgatgggactgccgctcagatcgatatctccagtagcctgtctctgaccgggacaccagttgggtcggctctgcaaatttccctcggttccggtaatgctctgcagtctatcaacctgttggcgctgatggtacgcaccactgctatcatcaaaaccaaaactgtcacgaccgcgactgagactgtgacctttaccaaccaggccagcatccagcttgcgaaccatgacggttacaaattgacttccgtcaaaaatgccaatggcgctgacgtgacctctaacttcactctggatggcgggcaacgtgatgcggcgtactacaagtccagtctgatatcggccactggagccatttcaggcgcgtataccgtggaatacacgtatttcgctcacagtactggtgacttctttacagctgattcgtatacttcgattgattacaaatcaatcccgaattatacgtcaagcacgtcgggtacagtgtatggcctggccgacagtattgacttccgtcctaaaatcaccaatggtgcgtctgatactgatatggtgcggcctaacacggcgatcatcatggacgttgaatattatctgcctcgcattgatgctgtgtacctggcagacaacggtgttttcaacgttgcccgtggtattagttctaacaacctggcggctccggctattccggcaaacgccatgcgtttgtacgaactgttgattcctccgtatactccggatattgacgatattcagatccgtactatcgacaaccgtcgttacacaatgcgggatatcggtaagctggacacccgtatatcgaacgttgaatactatacaacactgtctcagctggaatcttcggctatgactcagcaagtattcgacccggtaacaggcaacccacgttacaaaaatggtatcgccgctgatccgttcaaagacttccgtctgattgatgatctgtcttccgactggatgggttccgtagacaccgacaatggtcgcctgcgtccgtttgtacaacaaaacgcgattgatctggtcccggatggttgggacaaggttatggacggtatggtcgtgtgcaaatacacgccggaaatttctgtcaaccaggaatatgcgacgacgacgatcaacgtcaacccatatgcggtcttcaactggactgggttcctcaaactcaatccgacaacagattactggtttgaaaactactatgttgcacctcgtgtgatcaacgagacgatcaatacccgtggcgctgtcaaagaaggtacggtttatggtacatggcggaccgtgtctgtttctgaacgtgtttgggaaccgcatggtgcaggcggtgtttggtggggctatcgttaccgcacgaccgtttcaactcgtgatgtttcgacttacacgtacacggatacaactacgacttcactttctggcgaacagattgttgaaactcaggttattccgtacatgcgttcaatcgaaatcaactttgacgccagcggcctgcgcccgttcaccagaatgtacgccttcttctctggccgtgacgtgaatctgtactgcaaacctaacggcggggcatatggtgcgccgttgacgacggacgccaacggtaatctgaaaggtgtattcaaagttccgcagaataacaccattaaattcaatactggtgacaacgtcttccgattaactgacagcccgactgatagcaagtctgctgatgatactctgacgaatgccgagattgttcataagtcctttggtaagaaacaaggtatccagaagacctatgttaacacacgtgtgctgggttatactgtatcgactaaatctgaaacaacttcgtctgaagccgttgttggtcagtggcgtgatcctatcgcacagtctttcatggtggcgaccagcatcggtggcgaatacattgaaggtgtggaagtgttcttctcaagcaaatcacgtgatgttccagtaaccctggaaatccgtgagatgagcaatggccttccggcaagtactgttatcacccggaaaactttgaacccgtctgacgtcaaagtatcgaatgactcttccctcgggacgaaattcactttcgattatccagtatatctgcaggctggcacagagtttgctatcgttcttctggctaacacccaggattacaatgcttatattgcagaaatgggtaaaaagaacttgctgtcgaatgaatatatcgccaaacagccgtatactggcgtgttcttcacctcgtcaaacggttcaacctggtctccgaaccaaatggcggatatgaaattccgtgtgtatcgctgtaattttgctgctgccgacaacgtggtgacatttactccgaacgccgggcctaaaatccgtcctcttggtctgaatgtgttgaactgcgtcaacggttctacggtggtcacagtttacgcacccggccatggtcttgttgcgggcaactctgtgacattatctgaactgacgggcggctgcggctttactgtagagcaactgaataaagttcacaccgtcacggatgcgagctatacttcattcaagattgatgttggtgcagctgcagatagcgatggacagattggtggtgaagatggttctttcttgggcaattacctggtagatatgttctatgccagcgtgaccaattcagctctggaaggttctatattgaaactggaataccgttatcgtgattctacgtccaattctatgtctgattgggctgagtttgaatctgatactgatgttcctctgccgacagaaggcatttatcgtcaggccggggacttccaggtaagagccaccatgactcgcagcgcgagcaatgcgtacacggcaccaatgattgatggtgatgacttaaccgtggttctcaactcgcatggcgtagatcctttcgaggacgttttccgctatgtgaccaaggacgtaagttttgacaacccgtgtacaactttgaaaatgtacttcggcgcgatgttgccttctcagtccaccatgactgtacaggtcaaacttctgcgcccagggcaagaaatggattcgatcgaatgggaaacagttacaccgaattctcctctggtcaacgatggttccgcattctttgaatatgaatacgataagaccgtcgacagcaacagtccattttcagccctgaaagtcagagcattaattcgcggaagccggatagccccaccttcctgcaaagatttccgcttgatcgctctggcataaataaaattgaaatggcggggattcccccgccctcttgagaggatatgtgtatgcgtggaatgaaagtacaggggcacgcatcaatggtacgcagtagctcttgccccggagcgatcatctgcactgaccatgttgctggaatggcggcgcttcggtctcgccaagatactgaacaaagagaggctaagattgcccagcaatcggcccaaattgatcagcttgaagcaaccgttaaaatgttggcagaaaaactcgggattacaatcccggacgggggcgaaaatgacaacgcagaataacagcttgtttaatgttaaggaaatcttgactgctgccgttgcatcgttgttagtctcttcggcgacattcgtatggtttatgggtggattagaaaaccgtgtgaatgttctggaaaaagactctgggaaagttgaccagattttggttaaggttaatgatctcagtgaaaggatggccgtcatgaacaacgatatatcctacgttaaacaaaacgtgtctgaattgaaattaaacagcagcagcctttctgacgacgttagaacattgcgcctgactgtttcagatatacagcgcaaggagggtgttaatggccgtcaataagattcgggacaaagattcatttatgaattatgtccttcgcaaattgggtgcgcctgtcatccagatcaacctcgacaaaacacaagttgaagacgcggttgatgatgctttacagaagttttgggagtaccatcgcgacggtagccaagatgcattcttcctttaccaggtgaagcaggaagacatcgataaaggatatatcacctttccagaagatatcgatgacgttgtcgaagttatccaagggccaccaattgaatctatcggtaactgggcaaccccccagtggcagatggctcaggcgatgttagtgcccaaagctgctttggtatctatccgtcttatcgattatgttgctatgcagcaacgcctttccgatatcaccagcgtcctcaatgtccgcagggcattcgtctacaagaaattccagcgtcgtctgtatcctcaattctcagctgttatcgatgaagtcctggcgttcaagtgctaccagaacatcgacccaacagcagaagagaacacagaagcatggaatgatatgtggctgaaggcttatgcgactgcattggtaaaacgccgttgggcggaagtgctcaaaaaggcccgaggcatccgtctccctggcgggatagaactggatggtgatagtatgttcagcgaggccgaggcagagatcgagcgtctggaggaagaactgcgtactggtcagcagtacccgatcgacttctttatgggataacaaaaagccggggtttcccggctttcttttagagtttgatgtcccgaggcccagggagcgaagtcgcctgaatatacccatcatggacgttattactgtcccaccattcaatgaaatcattcccgtcagattgttttaccaaaccgacgatatcataatcaccacctgagattttagcatccacacagatgattcttactcgacttccatcacgagtttccttgatgtcttcaacctgcattcgtcaattcctcaatagaattaaacatcgactaaataccttcaaaattgagggtatagccatggccacttcacgatatttcaactacacgaaccaccaaggcacgcagaagttaattgatgacctcgtggtggagatgatacaattacgtgggatcgacgtcaagtatattccacgcgccatttatgaaaaatacccaattttaaacgaggcagaacaccgtttcgaccaggcgtttgatattgaggtctatatgcaggactaccagggcttcaacacccaaatgtgggagaagttcggcggtatccagctacaagatgaggtgacatttactatcgcccgtcgccgctttgcggaagttattggcaacgggccaggactggatcaacaacctcaggaaggggatctcatttatcttccgatggcgaataaaatattcaaggtcaacaacccgaataatgacgaagacttcatgcaattcggtaaatggtacacatattcattaccatgtaccttgttccagtatggcaacgaagacttcgatactggtgtccctgaaattgacgatattgataaacgtcttcaagatcttgaaggtgatggcatttatcaggatgccaccctacagacagacaaccagtttgctgatgagatagaagaagatctgtctaccaataatgtcaaaatagactttggagaataaccatgagaccttttcagaattatttttaccatggttcactcctgaaatatatccatgtgttcaacgctattatgtctgacgttcaggtgaaaaccgagcgcggtcttatgaaggtcccgttacacatggctattggtcgtcgtaatgacctgaaccgaaatgttccggcgaatgcattaccatttgcgacgatgtctttcggccaatttgaaatcaataaacaggtaacgaattcgtatcacaacaaattggcgactaatactgcgacgtctaagcaacgaattccaatcatcatcgactttgaatacaatgtgcgtacaaagaagatgaatgaaatgcttcagatccttgaacagatttattctgtttacacaccttcaatagattgccagataaaggacaacgaaacgctcaagcaggatcaggttgtgaagatccaattggtgagccatacgatgtcagataactgggaaggggatgctgctgaatctcctcatgtcgattgtaatttcatgtttcagcttcatggtgctatctatggctgggattattgggttgatgacggttccggtactggtgatccaaacgttatcaaggaaataattatcgaaatgtctactgatttgaatacaccgtggacggaattgcctctttggtttactgttgacaaagacggcgtccaccatccagaggatgattgattatgtctaatatgtcggaacgtttgttacagaccttagatgctgtctcagcacgagatgaggttgctcaagatgcgatgaagaaaaccgcattgaagcccggtgttgattatgatgaagaaacgggggagtggttaggtgatcccccggaagggtatcaaggattcgagatgccgccatcattgtctgaagtcgcgtcaaaagaatcaaaagttcctgaatacgaggacactgatgccacgactgactacaaacgtattcgtgacaccacatatgctatgcaagaagccacgatgttcatgatgggcaaggccgctgaactcgccgcttctacagaggctcctcgtgcattcagcgtcttccgcgagctgggtgaacttatgcgtggtctcaataaagacctgatggaaaaccagaaaaccatcaaggatgttactcgcgacaaagagccgccgggacagaccaccgttgaggtttctgaagatgaaaatggaacgactacagtcaaagtcggcaagaccgctcggtcgtcaagagatcttcttcaaatgattgagaaagttcgacgtgatgccgaagccaatcgaaattctcgcgtcaaccccgatgaagaagtaattgacgtcgcggaagaaccaaaacaggaagagaagtcagagggtgaggacgatggcgtatccgaagcgtgaagtcgaatatgccccggtcaagacggggtttaaaattgaagacgtcaaattgcgtatggaccaaacgttcatgcgcaagccgactgtgcgtgctcctcgtgttgaattagtccttactgatgagcaggaagaagaatatgtcaagtgtgctatggacgcgcactacttcgctgcgaattattacaagatcaccacgattgaccatggtttcatcttatttgacatgcacgattatcagaagcaattgttccatgatttccaggatcatcggttcaatgctgttgtgcaggctcgtcagtctggtaaatgtgttcggggcgactctgaagtttatgtttacgatactctcagccaggaagagttctctatcaccatagaggagcttcacagccgcttcgaggacgttaaccatgcagagccgttgaataccattggcaaacacaataagttcgtagacagccgcttcggcaaacgatactttgtgaagtctgacagtggttgggttcctgtaatcgcagcacacaagacaaaagaatatgcagaatatgtggtaaaaactgaaagtggccggacgattcatgtcgcggacgaacatttattctttaatgaatacgaccgtgaagtgttcgccaaagatctggaagccggggatgccatcatgacgcaagatggccttgaatgtatttctgaaatttgggaaaccggcgaatcccaccacatgtttgacctccaggtgaaatcatctgagcagcgttattacaccaatgggttcctgagccataatacgacagtggtggcggcatttctcctctggtacgcgatgttcaactctgacaaagagatcgcggttcttgcgaacaaagagaaacaagctattgaaatcctggaccgtattcgtaaagcatatcaggacatgccattcttcgtccagcaaggttgtgagaaatttggttcaactctgattgaatttgagaatggttcgaagatctttgcatacgcgacttcttcggactctatccgtggtcgttctgtatctctcctgtatgtggacgaagtcgcattcatcgaaaacgactttgaattctgggaatcaactttcccggcgatcgcccaggcagagacttcgaagtgtatcctcaccagtacaccaaaaggtcagcgcgggctattttacgacatcgtcacaaaagcgaacccagaacatcctcaatacaacgacttcaatcttacggaagttccttggtacagggttccggcgtacaccaaagacccgaattgggaatccaaacaacgtgccaaacttggcgacgctcgtttcgatcaggaattcggtatcaagttccgtggttctgtcggttcattaataccgtcgaaatgtctggacaagatgacatccaagttgtatcaagagccgaatgagttcaccaaaatctacaaaccctttgacaaaaccagaacatattttggtattgctgatacaggcaaaggggttgagggggactactctgtgctgaccatattggacatcacggaatatcctcatacgattgcagccaaataccggaacaacacaataccgccgatgatgtatgcatacacgattgccgatatgtgtactcaatatggtgaatgccctgtgcttgtagagactaacaatgatgttggtggtcaggtgatcacaatcctgtatcaagaaattgaatatccggaaatcgtgttcacgtcaacagacaataagggtactggtaagaagatcggcggtcgtcgtcctgaaccagggatcaacaccaacaagaaagttcgctctatcggttgtgctaacctgaaagcacttatcgaaagagagatgttggtaatcgaagaccaggatacgattgatgaactgagtacattcgtgtttaccgggacccgctatgaggcagatcagggttgtcatgacgactgcgttatgccacttgttttatattcatgggctgtaaaacaggaatggttcagtgatttaactgataccagcatttcgagagatatgcgcggtcgtatgaatgcgatggagcaacaccaagtcctcccgtttgggggcaaatttactggtgatacccctcatgaagtacagcatatgccgggctttgggggtgtgaatgtatttgatgaacgttctgggatgtcaatggaagagtggttcaagaactgatcactaaatatctttcaaattgagcgaaactctaccgagaaggaataatgttatggcaactacaagtttcagcgttgcgccgtctgtacagtggaccgagcgcgatgccacgcttcagacgtctccgtccgttgttgttcagggcgcgtctgctggtaaattccaatggggtgaagtagaattgcccgtgttggttactagcggtgagactggtctggtgaagaaattcttcaaaccgaatgatgataccgcgatcgactttctggtcatcgctgactttttgtcgtacagttctgctgcatgggtgacccgtatcgtcggccctactgccaagaacgccgtgactaaaggtcagagcgctatcctcatcaaaaacaaactggactttgagaccgcaagtccgtcggcttctatcacctggactggtcgttatcccggttctctgggcaacgatatcgccgttaacatctgtgatgctgcgtcattcccgacctgggaattccgtaacaactttgcctatgctcctcaggctggtgaattccacgttgttattgtggacaaagttggccgtatcaccgattcttccggcgctgttggtcaggttgaccgtatttctatttctggtactgctaccgccgctggcgccattacagtagcaggtgaatctgttgcatatctgcagacggatactccagcaactctggcggctaaaatcggcctggagatggaagcgctgactgatgtttattcgagcgttgttgtgaaatcgaataccgtcattctgacacacaaagctatcggcccgcagcctgttaccaccgtggttcctgatgctaatggcctgactggtactgcgaccatcaccactgttggcgcatccggtacgatcatcgagaagtatgaactgatgcagaatacccagggttctaaaaaatccgacggttcgaacgcatatttcaaagatgttatcaacaatacttcgaattgggtttacaccttcactaatgccctggcggcaggtgtagttgaactcgaaggtggcgttgatgattacgacgtcaaccgtgtcgctgctatcgaagccctgaacaacgccgaagcatacgatgctaaacctgtgttcgcatactgtgaagaactgatcgaacagcaggctatcatcgatctgtcgactaaccgtaaagacacagtgtccttcgtgtcgccgctgcgtgatgttgtagtcggcaaccgtggtcgggaaatggatgatgttgtggcttggcgtgaaagcctggtgcgcgattcttcctatttctttatggatgacaactgggcatacgtttacgacaagtacaacgacaaaatgcgctggatcccggcgtgtggtggtactgcaggtctgtgggcgcgtactattgagattgctggtatctataagtccccggcgttccataaccgtggcaaatacaacaattacaaccgtatggcatggtccgcgtcttctgatgaacgtgctgtgctgtatcgcaaccagatcaacagcatcgtcaccttctccacagaaggcatcgtgctgtacggtgataagactggcctgacccgcccgtcggcgttcgatcgcattaacgtgcgcggcctgttcatcatggctgaacaaaacatcgctgccatcgccaaatactatcttggtgaaaacaacgatgcgttcactcgcagcctgtttagcaacgccgttcgtccttatatccgccagctggccaacatgggtgcgatttatgacggtaaagtcaagtgtgacgaagacaacaacccggctgaagttatcgcagccaacaccatggtcgcgggcatctggctcaagccggaatactcaataaattgggtctatctcgactttgctgccgttcgaccagatatggaattctctgagatcgaatcaggcggcggcattgtagcagcctcctaaaacaaaccccgcttcggcggggttttcatttcctctctatcttccaaccagtggtgttggttctcttctcggatgatttcctatacggtttgggaaccgggttgcctttctttctggccaacaccatattgaatgtctctatacagaggttgtgctcctggcagaatttaatcagattcttaatttcatattcttcaccatctggtgaaagaagtgtaaaccatcttccgagagaccgatttattttctcttgaaattcaggtttcatacgcactttgtccatagcgatacgaagattttctttacattttggattctcgtatgcttttttaatccgccgggattgcaattctttcttttcttctgtccacaggaccgcttgggattgggacatttttgttttactttcttctttatggaccaaaccgtattgttttgccacaaacaaaacattccaaccagcatctttaactggtttcattccgatgaattctctggtttctatatcatatgctgctgccatacccgatatgtctatttgaccaccacggctgatgttcagtccaccttcagagatatgtgtcttatgtaattttatgagttcaatttctttagaatttaggtcatcgacgtggcattccagcaatatctcttggtcagtaattccatattttcggatataattgtagaggatagttttatttcctcttctagcctcactcagatgctcctttatccggtgttcaaccccatttcttgtttggccgatatacttctttccaccaacgattaacatgtaaatgtgaccgatcatacaacacctccaagagcatgataccccgaaattgttcaacactaaataaaatagaggtaaatttgaaatggtatatgcatacaaaattgaaatgaatgctaacaacaaggtctacatcggtgtgaccaatgatccgcaaaggcgatatgagcaacatttggccaatgcatttcaatataatgttgaaagtgaattgtatgatgccatgcgcaaatatggggcttctgcttttacgttcgtgattattgctcaaaccgatgaagtccacaaatgggaattggaaaagcaattaattgctcaatataattcttatgaattgggctacaacatgaataaaggcggtaacgatggaagtcatctggttggtaaagctgctgctaaattgacctccactggagaacatattggtatggtctcattaattgatccacgttgggatctctgtgagattgaaccagtacggaacaatgttgatcatggctttgatctcagtaaattgacgatcaaaagattaacagactaattagaattgtgtaactctttttggagaatgtataatggctacagtaaatgaatttcgcgcggccatgtcacgtgggggcggcgttcaacgtcagcaccgctggcgtgtgactgtaaacttcccggcattcgtagcgggttctgacaccattcgtgacgtatctctgttggctgtaacaaccaacaccccgacaggccagctgggtgagattctcgttccgtggggtggccgtgaactgccgttccctggcgaccgtcgttttgaggctctgcctgtaacgtttatcaacgttgtagacaacgccccgtataacgcatttgaaatctggcagcagtatatcaacggcagcaacaacaaccgtgcgtctgctaacccagatgattatttccgtgacatcatcatggaactgctggatgctaacgacaacgtcaccaagacctggactctgcagggcggctggcctcagaaccttggtcagctggaactggatatgtctgctatggactcctatactcagttcactgttgacctgcgttacttccaggccatttcggacaagtctctctaacgttacacgtggtgggggaatttattccccaccactaattacaagaaaacgttgaggacatataatcatggcatacggcaaaggtttctttggtctgttcagcggcggcggtttagttgacgccaaagttgacacggacaaatatgtccagagtcaagaagagaagctgctttcaaaagcgactgttgtagctctggacgacgctcaggatggttcagtcatcctccagggcggggccaacacttacaattttgttggtgttgagagcgagctgcttaatgtcaaacagcttgttgaagaatatcagtccatggctcagcagcctgaaatccgcaaagcggtggacatcattattaacgacgttgtcacctgcgaagaagatgaaacgccggttactatcaatctcgataaagttgaaggcatcagtgaagatttgaaagaacaaatcacagaatgcttcaaagagattatgaatttgctggactttgacgacaccgcgtatcagaagattcgtaaatggtatgttgaaggccgtcaggcatatcatgttgtaactgacccaaccaagccgggtaacggcattcagaagctggtcatgcttgattctcgttgcatccgtccagtatacgtcgttgagaaaacgatgcgagaaggcggtatcgaggcgatcgaaaaggtcactctcaagtattactacaatccgaactacaaccgcaaccaattcactggtcaatctgggacatctcagaacttccagccgtctcaacaggaactggtatttgacgaagaaagtatcgtctatgttgatagcggtgaagatcctttggcaaatggtgttgttcccggtctgctgaaccctgctatccgtccgctcaacaacctggttacggttgaggatgcgacggtaatttacgccatcacccgtgctcctgaaaaacgtgcattctatctggacgtcggtactctcggtaagaaatctgccgaagaatacatgactatgatgatgggtaaattcaaaaaccgtctggcgtttgaccgcagtactggtaaaattacgggcaacagccatctgatggggatagctgaagactactggttgcctcgtcgtgaaggtcagaacgccactgagatttcaacagtcggtggtggcgaccaattaggacagatggaccacgtcaattacttccttgaaaaactgtatagctctctgtttattccaaagagtcgtatccaggaagaagggagcatcaatattggcggttctaatttggctgagatcacccaggaagaactgcggttcaacaaattctgcgcaggtttgcgccgtcgttattctaaattcttctctgaatttttacgtcgtcagttaattttgaaaaagattactgatgaacaagattgggttgaaaaaattcaaccgttcgttacgtttgaattcacctcagacagttttatccgtgaacagcaagaaaatgaaatgcttgctggtcgcctcagtgccctgaccggggttgagccttatatcggaacattcttctcaattgattacgcgatgcggaacattatgcgtatgtctgatgaagaaattaaggcccagcaagagaagatcaaagaagaaaaagataaaggaatgtatccgaaggttcaggctgatgaaagcggtgggtttagtggacaagatgttagcccgctgaaatggcgacctgaagtcgtacctttccagggtacgcccggcggagtagaagagtaaaaatttatcaactaaatatagaaaattaacttcggagatacaatcatgagcgcgatcgatattgttcgagccgtactggatggtgacatcgaaaatgccacggcagaatgtggtatggaacttgatgcccgccgtgaagaactgattgctcagggtacagaatacgttctgaattccctgggtgacgacctcagcactggcgcggaataggtgattaatatggaaatcaaagaaattgccacgttcgctgatttcctggcttcccgcatggacgaacagaaagtcatcgataaagtgaacgcaaaaggtaaacgccgccgtcgtttaaaatgcgctcctggattcaaactttccgctgatggttctcgttgtgaagtcatgaacgccagcgagcgccgttcccgtaaactgggcaaccggaaagccatacgcgccaaaaaacgtatgggtctggggtatgaacgcaaagtcgagcggcgtaaaaagaaagccatgaagttccgtaaaatgatgggactgagtaagtaaggagcaaatgatgaaactgttgcgtgagatcacggcgataggaaaggaacttcaaatcggggaagcgcaaacttccactggtgggaaggccatgttcatcgaaggtccgtttgtgatgtgtaaccaggttaaccgcaacgggcgcaactacgaccttgaaaaagtcggtcgccctgctgtggaagcatatgaccgggaatacattcaagatcgtcgcgcaatcggtgaactcaagcatcctgactatccatttcctgatatcgaacatgccgccctcaaaaccgagtcactcgtgtggcaaggcaacaatgcaatcgggcgggcgcgtattttaaacacccccaaaggtcagatcatccgtgctctggctgatgcggacttcaacctggctgtctctacacgtggcctgggtgagacagtagaagttaacggctatgatgacgtcaagccgggcttcatgcttaccgctgttgatgctgtcgaccgtccttctggacaagtttgttatgtaaaagcggttcacgaatctgtagactggcaacttgatgaatcctctggtatctggatgcctcgggacatcaaaggtcaggttgtagacaatctggttaaacacaatagccagcttgaagacgacttcctgcgccgtcttgatttagctcttaaaaaattgggttgatttcagctcactaaatactgaaaaatcgttcagaaggaaattatcatgaaacctgaattacaaaaactgtttgagggcgttaatggcctcagcaccgagttcctggacaaagtgagcggtctgatggaggctaaagtcggcgaagcccgtcttcaggctatccaagagactgaacatgttgcccaccaggaacgtctgaaactggtggaagcgcatcagcaagaaatcgctaacctgaaagaaactcatattcaggaagtggcgaccaaagttgatgcattcctgaatgccgtggtcgaagaatgggcgaacaaaaatgctccggctattgacgctaccatcaaaaccgaagcggctgaaaaattcctgtctggtatggtcaacgtgctgaaagaagccaacgttgaatttactgtagacaccgacggccagatcgcggcgctgactcatcgtctggcggaagcagaaaaacgtgcaaacgtttctgaatccgagctgaaacagatccgcgaacaagaaagtatccgccagcgcaataacgtcattgacgaaatttgcgaaggcatggtcagtaccaaaaaagaagtcgttgttggccttctggaaggtattcaattttctgacgcctcttccttcggcgctcgcgtccgcaccttccgcaacctggtagaaggtaacaaagacgactttactgacaaagtcggtaaagacaacgaaggtggtaaatcttctgatgataaggaaaaagacatcaaagaaggcaaaaaacagaaaaaagaaggcgacgatcctgatgatgacgatgacgacaacgacgatgaccctgatgaaaccgacaaagaactgaaagagtcggtcagccgtcagctggaagaataccgtcgtatgcgtggtctgaaaggctaaattttgcagccacagccctctataaaagggggcttgattttgaacgactaagtaatttcaacttaactgaatatcaatgtaaggaatgagcatcatggctaagaaacttgttactgaacaaatgcgcgaaacgtggctgccggttctgaatgaagaatccaaatctattcagccgctgtctgccgaaaacgtcgcggttcgcctgctgcagaaccaggccgaatggaacgccaaaaatctgggcgaatccgaagcgccgggttctctgaacaccactgtcggtaaatggcaaccggttctgatcgatatggcaaaacgtctggcgccgatcaacatcgcgatggacttcttcggcgttcagccgctgtctggtccggacggtcagatcttcgcactgcgtgctcgccagggcgttgctgacggttctaacacccagcagtcccgtaaagaactgttcatgcaggaagccgattccggttattctggtgacggtactgtacaggctggcgacccgtctggcttcacccaggctgagatcgaaggttccggcgctggcaccaccaccatcggtaaaggtatgccgtcgaccgacgctgaactgctgggctctccgtccaatccgtgggcgcgtgttggtatcaccgttcaaaaagcgaccgttactgcgaaatctcgcggcctgtacgctgattacagccacgaactgcgccaggacatgatggcgatccacggcgaagacgtggacaacattctgtccgacgtgatggtaactgaaattcaggcggaaatgaaccgcgaattcatccgcaccatgaacttcagcgcagtgcgtttcaaaaaattcggcaccaacggtatcgtagacatcgctcaggatatctccggtcgttgggcgctggaaaaatggaaattcctgaccttcatcctggaagttgaagcgaacggtatcggcgttgacacccgtcgtggtaaaggcaaccgtgtcctgtgttccccgaacgtagcatccgcgctggcaatgtccggcatgctggattacgctccggttctgcaggaaaacaccaagctggcggttgacccgactggtcagacctttgcgggcgttctgtccaacggtatgcgcgtctatatcgacccgtatgcagtagcagaatatatcaccctggcgtacaaaggcgcaactgcgctggatgctggtatcttcttcgcaccttacgtgccgctggaaatgtaccgcacccagggtgaaagcaccttcgcaccgcgtatggcgttcaaaacccgttacggtatctgcgcgaacccgttcgtacagatcccggctacccaagacccgcaggtatacgttacctccgacggcattgcccaggacagtaacccgtacttcaggaagggcttaatcaagtcgcttttctaatagaaacaacgacttacaaaccccgcttcggcggggtttttatttcagaagtatggggttataatgtcctgaaagggggaattatgagccaaccatacgtttacaaaatagaatcaaaagatggacacatctattatggatgtcgtcacgcaaagaactgtcaccccaaagaactttgggtaaaatatttcacgtcctcgaaagtcgtccaatcccttatatcacaacatggaccagattacttcacccatgaagtaataatgctatgtcgggatggagaggaagccctccaagttgaagcacaattgatcgaatccgttcacaccaaccctctttgtttaaatcgtttccatgttaagaaagatggttccctcgtttattttggaaggactgggccacttagcgaggaagcaaaggcgcatttgtctaatgtaaacagagggaagaacaaaccaattggattttcggaaacatcacggcaagcccagatcaaatggcagaatgaaatcaggatatggaagcgtccaagggcaactaaatgccaacacgtttgggctatggctgaccaattctatcaattatggaagaatgaaggttgggggcatgagcgtttctgtaaccgtataaacgatggtaagaatgtcagggtgttctacaacatgtacaaaatgttcaaatatgaaaattgggttcctatggaagaccctgaatgggtaaaagatttcatgtagttttttctttatacaccctcagtgctattatattatggtctatcactgaggaaacaaatcatgaatctgtcaggagcagcaattgatgttctataccaacttttctggtttgggccaagagaagctggtgaaattccgtctaaatctggtgagttggaattgttgtctaaagggttgtgcgaaagattagatctggtttctacacccaaaggcaaagatactcatctctgcgttttgactccaaatggttacgtccaatcccgcgctcttttcgtccattccaacaaacaggaaatcaaatcatgagtattcaattaaccatttcttccctgatcccagcgttcggcagcaatctggaacaaatcacttacatccgtaatcgtttggaagatgtggcgttccaattggggtatgtggaacctcctcgggaagtaaaagaagcggaggatgctgcggcaccttccaacctcatcgatgcgtatgatgaaatcgggcgtaaaacgaacgttgtcatacagcaaatttttgaatatatcgggtttatagaaaacgcgctggggaattcttaccatccccaatctgattcggtcaaggaaattgttccaacgtccattgctggaacatctaatggcatttaaaagagagggcgcagttgcgcccttttatttgggggttttatgtactcaaatatctcaaactctgaagccctgtctttggctaaacgataccattgcttcaggtcccgcgccgggcattcctgggataaaaaggcgtggatcaagcaattacagatacaaatagagatgatggagtctctatccactcagtgcggaaataacccattcgctgcccgttgccttgaaaaggagtatgcaactcttaaaatgcaactgaacgctgcgatgtcacatgttttgcactcttaacttttcaataaacagatttcaattattattcacccacaatctaaacgaggaacaactgatggcccgcgaagacaattcacagatttctaccaacgccaactcaaccttcaatgagtggcacaacacccttgagcgcgtagcacgttctcaaggcggttcagctgctgacgccgatgcctggcgtgaagattatgacaacggcaaaacgccgcgccaggcatgggaagacgaatggggatgggaagatgcagacactaattcgtaaaatctttctggataaaaaggggatggaatcaaaggtcgaaatcatcacgactcaaaaattgtttgagaaaggtgaaactcgatactatattaatgtgttcctttaccttccagaatgcagcctgaaccgcgatattacccaaccagatggaactgtggtccgttgggaaatagccaaacaggaagatgttgaaaaagacataacactttgaagcgagatctatatcatgacaaataaattcatttttctggacgttcgcggtaaacgattcttcaaaactgatctggacgaaaagacagaagggttccaagggcgattatcatatttgttgccgacaggcgatattgacacccaaagatatgtggcggatgtacgggatctcctggattgtggttgggttgaaattcctaacccccaggtgttgactgtcaacctgtattacatgaaggaaagtgggaagtattattccaatggagaactccacctccttcgttctgaagtcactgccgatccagccaagagttggtacaatgctagagaaaccgtccggaagatggttgatgaaggcaatttgcctggcctggtatccggttctcgttacgatgtgttcatgtcctgtgaagaacacccgtgttatgtgcccactttggtgaaggtgaaatgatgaaaactcttgaacaaattttagaaggtcataaatcaggaactttgtcggcggctttagacggtcgcgatttgacccgtctggcacagttcctgacagttgagcaaattgaaagcctgggactgtcttttaaatctcctgaaaaacgtgaatcccatgtcccggttgaattcaccaaagaaaatatcctgaaacaactggaaaaggacgtcgcctttgggtttgaaaaggctctgaatcgtcgtgggattagttctagccttatgtacgaagtcgtacaaatgtggaactgtatccttgaagaaggtctcgaagattttgattcgtatgcgatgtacggccttcctctgtttaaagcaactgctgtcaaatacgggtttgacaacccaatcggtgatgacacaggtgccgaagatcattatgaagagcaggactattaatatgcgtatcaaaaagatcggatccagcccgctgactggtactatcttctacggcaccctggaaaccaaaaccagtatgtgggtaggggaaaaggttgatgtgaccaatgattgtgttgcggctacggctgagcacatgcgttgtgttgggaaggattattgtttcccgactttggacggtaaattcttggtattgtcagctgaaattcacgatacccttccggaccgcttcaaatagatttaaaaataattcaataaacggggtttacttcttcaataaaccccgtatacttcatttcataagcagtacgacaccaaccctgaaatgaaggaactatatcatgatcactcctaacattactgtgtacgcttttgacgaattcgccaattttgattcattcatcaagaaatttggtgtggacaacgtcgcggctaagcaattatatggttccgatcacctgagtaagtccacccagatcaaggctacgttgggtgaattggtggagactctgggtgaaaccttccgcgctaaaatctataagaaagacggcagtctgcgcaaactgaaagacaagactgtcattcacgaggctgatcaatttaccgtgtctatgcatttcacgtttaagcctgaatatgaactcttcaccaacggcgacgattctacccattacgtcatcgccaaaggcagcaatcgtccagtatttgaatccggtgacatcgtcgttgcaatggaagaaatggagcgtttgaacaaagcataactattcaattaataacaatagggtatgatttattcgtaccctacgcaaatttgaggcttctatttcatggcgaacaaaactatagcgacttctctaccacctttagattttagtttagaccaatcccataaacatcgtctgtctattcattatcgtatagcggcggcggtatcagatggcagggagacaattgagttttaccgacctgccacttcggccaaagctcatcgtgatacttatgttattttgcgtgaattacgtgaacttggggttgatattgaacccatgccgtgtagcaatcctttgcttaatctcttcgttttgagcaacttcgagaattggaaatgaagaccattattctcataactggttcgcgttctattacagagcgcgacaaaatctttgaaaagttagacgaactttctcatacagattccgtttgtaatctgtatcttccgtgcgagaccctattgatcgctggggaggctgtcggcgtcgatacgatctgcaaagattgggctgagtccagaggggtgacttatcttgggatgcctatccccaatgaatacttcgctacatatgggaaaggggctggaaacaaacgcaaccaggacatgttagacaaggcgttggagttatcacagaaatacaaggcggagatactgcctctggctttctgggacggttcatcgactggtacgcaggatatgatcaaacgaatcaacaaagcagggttgtattgtaaggtcatgctcttgggtaagccaaaaaccaaacgccttctgtaatttgttaacactggagacgtcccatgatcatttttcaactgttttgctatttgttcactctgtactttctggttgctgtcggttatgaaaccttccgtgatctggaatcgagccagtattcatccaaactggtttatgctaagaaatttgctgtccgtttctggagcaattttctgtatcgcctcccctgatttaaatacccccatcaattgggggtattttcttatgaatgcacaaatctatgacgcactagagcaaggcaacgcctttaccaacccgctcccgggattctctgctacttctcagacgttaatcaccagtggccaacaaagtatagcaggcattacaagcatcccggatacgtccgttcaggcggcgataaccgctggtggtttgactcctactaaactgaataccatgaacaccatgtacgggactgccaacaccgggatcgggactctgaattcttatggtgaccagaccgttaatgaggcatacaataggatcggaacttcagtatcctataaatccggcctcaaaagtattcaacgagaacccaccaactgcgatttgattaacaacgcattcggtgtcgtacagacactcggtcgccaatggttgactgcaatggaggatgccttatctccaataacagacaaaatccaagaactgtatgatctcgccaaacaaggcgcggcggcggggttggccaaaatacaggcattagcctcacaggtcaacgggttaatcaatgacgctgtagcaaaggtgaatggtgttattcagaacatcactgatgggatagctgctgagttagcccatattgaagacatggtgaagaagtgtcttaatttctcctttgctaatgttcttggcgaatgggcaaaagatctttgcgcaggcggtgtcatcaacaatatcggttctaatgatctgaaaaatgccctgaaatgatcagggcacagtccttgctggcagaactcccactggctcaataccttccaccagaagggagttcacgcctacatcgctcaacctaatccatatcttcccaccaggcttaatttcaaaaacgttcatttcatttccaaccgcttcattattcacaaatacaccttgtgttgctatccttacaggtttcttcgtgttgtttgtgatttgaaatgtaacagttatatccgtggtcagattaactccctgtctcatggtgtaacgttttattttgtcgtagaaagatgggttgaatgtgatgatgatgctgttgttctgtgagtaataaatacttgctgacaagtaaggaattttgccttcttcccctttgcgtaaaagagggatggtggttttccagtatggtcgcaaagtgtctttattgtcatcaaaacaaccgacaggctggagattttgaaaactttgaaacaaaatggtggcctcatccagcatggatttttcacatttgttactgtctgttgaaatggttactggtacaacacggacatcagtatcccagaggtcactaacggaaatgatgggcgtgacgaaaatacggcaacttgtcaatacaagtaccataaaaatcaccacaatccatcttctgattccgcgcatcagggacacaattattctccacggtaaaggtgctaacaatgtctacttcagtccaatttaaacatgacaacccaaattatgcagcatccgataagtggcgcttaactatcggtgacctgatattgttatcccgctctgtacacgattttagcataccaggcgtgtattccgagggcatcgatgggccttcgcccggttcagtgctcaacacgatcccttctgaacgtttaacatatgatcccatcgtatttacgttcgttatcgatgaggattgggtaaactgggaaaccatctacaactggatagccagtaacgccgccgctgatatggctgttagcaaagatatcaccatagaattactcaacaacatgaaccgcccggttggtttgcaacttctgttggaagaagcacgtccaactgcattggacaacgttcttgttgatgtggacgcttctgttccccaattagttacaacggtgactttcaagtatctgaaactgacaccgacccgtgtcgtccgcgaaattgataaagaatgagttataatagagagagttgaaaaggtgggaatattttatggaagttaacaacactcaataccaaacgatgtctatagaggacatcatggctgaactggatccactgattacggttgatccagctgatcgtaatttagatcagatttcgttgaagatcgggcgttcctttatgacagtgcagcggcattacattcgtgaagggcgttatctggaatatctgactgggcggtttaaacagattgatgtttatttgcgcaggtattacgccggggaattacctgcgcaatcgtatcgcgaacgccctctcaacaacaaaccactgaaaactgatctgcctctatgggttcaggccgacgatatgtatatcgagatgtcaggtctcctccaagagcagaaggcaaaggtgaaattcatcgaaaattgtttggatcgtttgaacaagctgggttatgaagtcaaaaacgccatagattggaggaaatatctcgatggcatgtgacagaacaccatatgtatatcgaatcgtatccatatatggtgagatttatattggttctcgtactgctaagaaatgcgacccgagggaattttgggtcacatatttcacatcttcaaaagtcgtacactccttaatcgataaatttggttatgattattttaatattgaacatatagaaatattcaacactaccgaagacgcatacaggacagaacaaaaacgcataaaagatatttggggatcagaaaaattacttaatcgacatttccaagatgatgataaagatatttggctcaccacaagtttaccagcggaacgaaatccgatgttcggtaggactggggacaaacatccattatatgggaaagtcggagccatgaaaggcaaaacagggaaagaacatcctatgttcggccgcagattcccaggaatgaatgctggaaaaaagaattattggtatggaaaatcttcacccatgaaaggttgtgttccttgggagaacccatcggctataaaatatggtactgtgaaaatgtggttatctgcagacacagcattttgtttttggaaagaacataatgtgggttattctaaacttagccaagctacaaacatttcagaaggagtttgtagtagtatgatagctagatttaaagctggatggaacccgttagaagatttagattggatcatttttaaaaggaaacaaggatgagccaactccaggtactcaagaatatcaacaatattgaggaacgtcaatatacatttcagcagtacgaattaccgtacaaggagctgacttgtgtaacgaacgagaatggacgccattacgtttccccaacaggagtgaagttgacctctgtgacaaccatgttggggcgtaccagtgaccatacatggttggatgcctgggtcgaaaggcttggagttgaagaagcagcaattgaaacacaaagatgcgctgataggggagaggcagtgcatcttgcttgtgagctatatctgaagaatgccccaatgaaagatgttgtagccgccgctgggcaatatttattcatgttcatgcaattgtttccctatctgaatcgcatgacaaagatatatgctcaggaaatacctctatatagcgaagtattgggcttggccgggcgtgtggatttaatcggggtgtacaacggaaccccagcaattatcgacttcaagacttccaatactctgaaaaccagggacatgatagaggattacagcatccaattgtgtctgtattcagttatgtttcaacagatgtttaatgtcaaaatcgagcgtctcatcaacatcatatccaatgagaatggtttactgccgacagtaatagaattcgacagaaaagatattctcccaaaaatgttcgagcgtgtccgtttatatcaccgtatggacaaggaacagaatggaatctgggcagaccgctaaatactccatataattgggaggattggtatggccgacatttctgtgaccaaagtgaacgaagtccgtatgcgtgtgcatgctgacgcagggatctatgaagaactaaatgattatttcaaatttgaagatcccaactttcagcctaatcctttcagcaaatgggatggcgtcgtccgcttatttaccaaatcttccggcctgattgacatcggtcttctgtttgaactcttcaaattttgtaagaccaacggttattcacttgacgtggatcctgcattgaaatatatccaggacatccctgataatgaaatccatgatttctgtaataatttgaaaacacaaattcgcacagaatctggggaatacattgatgctgaagttcgacagtatcaattcgattccatcgccactgccatgaggcaatctcgctgcgtccttgagctggctacaagtgccggtaaatcctttattctttatgtgatggcccgttactacagggaaaggcgagaagcgctcgaaagtaatctgaggacgcttatcgttgttccttcggtacaccttgtaagacaattgtacgagaacttcgaagaatacagtcatggacaatcctggaacccgttctaccaggtacagaccatatgcgaaggtgcaacccgcaatattgataagcctatcacaatttccacatggcaaggcatacaagaccagccaaaggattggtttcatcagtttggtgacatcattgttgacgaagttcatacttcaaagtcggataaactttcatatatcctcaacaactgcataaatgctgaccagcgccttggggtgactggcactttggcgaacactaaagttgctgggctgcaggtggtatctcactttggtgcctaccacaaaatcatcacggctcgagaactgatcagtatgggatatgcagctgacattaaaatccggatgatagaattgaaacacagattggcagacgctattgatatgcatggtgccgattatcagaaagaaatggaatatttgatatcgaacgaagttagaaaccggcttatcgccaagatggctttaacattgaagggtaacgtcgccatcatgttcgaacgtattgatgcccatatgatgatcgtgtatgacatcctcaaagaaataaagccaaacgtatttgtcatcaacggggaggtcaaatcagcagaccgcatgcaaatacaaagggcgatagaagaaggtgaggatattactctgttggcatcttatggaacgatgcaacaaggggtttctataaagaaacttcaccatctggtattggcacacccaagcaaatcatatattcgtgttatccagactctgggaagattgatgcgtcagcactcaacaaaagacgtggcactcatatgggatttggtagacaatttgagttataatgggagttacaatcatgcgttgcgtcactctcacgagcgatacaaattctatttgacagagcgccaccctgtagaattgaaaagagtggcgctggaagattatttggggtcttgatccacataggcgggcgttggctcgccttcttcactgtcgtcaaccaaacccaggaatgcgtcgatactatcacaacaacgttgtaacagttccggcttgatggttttgttgatgaccgcctgatttttgttgatgagagggaacacttttaattcgccgaagttgctcatattgacgatcgcaacataaagccctggcttggtattaccagacaggaatgagaatgggacttccttggcagtgtctgattttgtttcatcaactaaaaccttcaaaagagtagttgttgatgtctcactacccaatttccggcttgccatatctccgtggctgtaccctacggcatagattgctactagttgtttcatgctattcgtctcgtgttgtttgcatccttatataatagtctcatgttatgtttagaccaatttaaaataatttgcctttcggattaaaaagtcctttcttgttgaacaaatccgtcgtactatacgagttgtgagctttgcgagcaacgagtattaggggtttacgagcgaagcgagttgattaatataaattaatagattaatctatttcgttaataatttgcgcgcgaagagatttaacacttgttctatatccccaaatgggcgatactaaattgcgtcaacaacatgacttgacttcactatatcttgaggatacataaatgcaagaaattactctgtcggaacgcactctgcaacttctggctaactttgaaaccatttgtccgtctatcgtcctgactcctggcaaaaagctgcgtaccgtaaatgacgcatcgacggttatcgccatcgccgatattgacgaagacttcccgttcgaattcccgatcctcgatctaaccaagctgctggccatccagcgcctgccgagctttaagagcggtaagatcgaaatgtacgaagatcacgtgctgctcaaaggcgaaaactctcaactgcaattctggcgctcggccaaagaactgacgactgttccggctgataccattgatctgccgtcggttgatttcgaagcaactgtgtcgccggaaaaaatgaaagagctgatccgcgcgtgttctaccctgggccacaaaactgtccgcatggtcgccagcggcggcaaaacccgtctggtgggtactactccggcaatcgacaattccaacgattacaccgttgaattgggcgaaactgcgctgggtgatttctccatgccgatcgacgttgtcaacctgaaaatgatcgaaggcaactatactatccgcgcctgcactgaaatgcagctggtcaatttccaatcggtcgacggcaccatcaactattacgtcggcatgcagctggaataatcttcaatatctatctgttgctttaatatcgttgcaggggcggaaagcccctgtattttgaaacgcatcatctaaagaggctgtaatgtctaatatcacaatcgttggtgaccaatacgcatgggaaaacaaatatcgcccggacaatctggacgaaatcgttcttccccaggacgtccgtgccaagatccatggctatatcactggtggtaatggcaacatcccgtcaatgctgttctactcaccgaaaccgggtactggtaagaccacgactgctctggcggtttgtaatgaaatcggctgcgtcaagccgctgatgatcaacgcatccctggacaacaacatcgacaccatccgcgacaaagttatccagtattcgactggcgtcagcgtatatggcggacggaaagtcgttatcctggatgaagccgagcgcctgtctatggccgcccaggaatcgttgaaaggtattatcgagaaggtgagcaaaaactgctcgtttatcctcaccaccaactccaaatcccgtctgaacgaaccgctggtttcccgctgccgtgaaatcgacttcatctggaccgacaaagaagcacatgaagtacagctacagttcatgcggcgctgtgctgaaatccttgctgctgaaaacgtcgaagtcgatctgaaagtcctcggtcggatcattcctcagttcttcccggacaaccgtaagatcatgggcatcttgcaagacaatgcctccacctacggaaaaattgatgaacgcgctttggccgtcgtcaacgcaggcggtatgcgccagctggttgaagagatgaagcgtaacaactgggacggcgttcgccaatgggtgactgataatcagaactacatcggcgatgatttctattcccgtttcttccatttctgtgtgccgcaggataaggacaagccacgggctatcgaaacgactagcatcgtcgatatggtcgctctctgtggacaggcgcagattgaacacagacaggctggtgacgtttggctgcatgcggtttatttcctgaccaacgtcatgctcaacattaagtggagctgattatggccgctccgtctttgttcgatttcctgggtgcgttgaacaacaccaaagagaacctcttgcaaacggacgaccctgatgttcgtaaggcttttgatccgtttatgacccggcgcgggctggcacagaacaaagatactcttgtcatcgcccagcgaatgaatttgcttcacaaggtcacgccgtggatgcaatggaatatggcattccattctatcccggcccgcaagcggtatgggaagtgggccaaaaaaggtccgctcgaccctgatattcagatgttgtctgagtattattacatcagccatgaaaaggcatcagagtatctcaaatttcttccaaaagaagcactggccgagatcaggaagaaagttgagttgtctaacagcaacgagaaagcgaagccgcgcaaggctaagtagttaaaatcattaatgaaggagtttggtcatggcgcgcaatacgctcgacatcttaaaactgactgcggtcgacgatgaggccagcatcgtcgattgtatggttgaagttgaactgaaccaagataaaccggggattttcctgggtatcaaggaaacactgagccgaatcggggttaatactcgccaagagcctgaaaccctgtatcagacctgccatatcctccacaaatctggcaagtattttatcgtccatttcaagcatctgtttatgctggatgggcattacaacggctttcagcgtgaagatgtcctgcgtatgaatcgcatcattcgtcttctggagcagtggaagatgattaaggttctgcatccggaacaagtaaccgaatgcgccgacatgtcccgtatcaaagttgtgaaacacgatcagatcgctgattggaaactggttcccaaatatatcattcgcccatctcgggccaaaagcgaataactggagtcgctatattatgacaactacatttagtaagaacgtgagactgaatctggcttttggtaatgctaaaggggacgtaaccgcccccgactttagcaaaattcgcaatcaggcgaaactcgttctggaagaaacccgcgaactcctggaagcggcgtatttcgatcatcaagtagttctgacattggaacttaatcctcgggaaagtgaaacgccgaccactactgaagatctgatgaaagccatcatggatgcgcagggtgatatcaccacagtcaacgacggcgtagctcatattgccggtttcgacggtgatgaatgcctgcagcgtgtctttgcttccaacatgagcaagttcatccgttctgaagatgaagtcggcccggcgctggactactactattcccgtggtttcccggaaggccagctgcgcgttgaaggcgaattcccccaggcatgcatcaaggttaatgaaaccgtgatgtggaaaggtaaagaatatccggctggtaaattcctgaagaacatggctgtcttccaggaaccggatttcagtgacatgttgacggatagccccaaacaacagatcaaaaccatcatttctagccaaacagcacaaaagggaaaggtttttgtagaccacaaaatgggtgttgcttattttcataccgatgacctcggccctttcctgggtgagcaaactggtggtgctatcgaaaatgttgttgatatgcaaggccagacagaaagttatgttccggtctaccaagttggtggcgaaaaatatccggcgctagaaggtatttgggcagcgaacgtccgtgtgtttgtgtactccccgtacaatccggaagtcacccagctgacccgaatcgattaaggctctcagcgtttcaatatacagcagaggctataatggcctctgtttttgtattctaagaagaggataccatgaaagataaacaatcagacatccaatattgcggtgtccgtgaagataaaatcaaatcagctgaaccaattctcagcccctttcatcgtaagctgtcgtatgaatggatgagcgaacgttacaaaatccacgtgagaaaggacgtccagcgccttccttctccctggacagaaaatgagatactacggcaggtcaagttctgtaacgtccggagagagcacgacaggcagtctcagcacctcatccggaatatcgtcgagaacaacaacctgtctctggccgacaagatgttcaactgccttctgttccgtatgtttaacatgtgggatcccatccagcatgttctggaaggcccggtctccatcaatgatttccgtaatatcaatttggaccgaactcgtgaacggtttgcggactttgataaaaaaggcggcgtgacattcaccaatgctttcaacacgggcgggctgaaacaatgtctggccttccctgaactggccgtaacaggtaagcccgccagccccagcaaaatgatggtgaaagtttatcgccgggggataggtgttgttgacgtccttccttacaaggtcgcaaaacaaatggtggaagatcatccgggtgaatacatcatcgaagggtgggaaccgcatatggggatgcgtgttgtccggttcctgaaagcgtttgttacccataaccctcatttcttccattcgttgttggggttcaattcaccgctatctgtttatgaagaattacgcgataaagtagaaggcctcggaccttttcttgcataccaggtttgggttgacttcacttacaatccggattatccgtttagtgaaaaccatttcactatcgccgggccggggtgccgcgccgggattgatctgttgtttctggacaaagatggtatgacccacgaagagtgtatcttctggctccgtgataaccaggatcaggtctacgggcaatatggttatgttcgtgaacaattctggtcggctgaagcaccggaagatcaatgcatgaacgtcatgcagctggaaaatatgttctgtgaactgagcaaatatacccgttgtgtcgaggcggttatgcgtggtgagaagcctcgtggcaaggttggatatgacggaagcggcgattataaaaagcgttgcgacgaagttgttctcaaccgtagttctgtcaatcttctggaaaggatgaagaaatgagttggaaattattcaagttacgcaaagccacagatgaattcctactggaagctcgtatgcaaggtcgtcttgtgtacacgccttatccaggaaccacgcgcttttgcaatacgttaagaaaacagaattctgtttctggtcctagaagattgatgaaccagggaatgttggcatacaactctggggatacccggccttgtgacggtggtaagataatctgagccaatatgatactggaataaagttttcaataactgtaatcggggtatattgacctcactttaacgaagcgcctcaatcggggcgcacatttgaactgaaacaggaagactatatcatgtcagattttaaacccttcgcagttgctgtaaagaaccaaatcaccgcgatgtccagcaatggcctgtacatgacttcggttgacaaagacgccctgtgggatctgtacctgtcatctttcccggaaggcaccaacaacatctaccgcgagcgcactgagcacgattgcacctgctgcaagcaattcatccgtaacatcggcggcgtcgtatcgattgacgctgatctgaacctggttactgtgtgggacagcgtcaatctgggcaacgaatacgacgtggtggcggcagcgctggccaaatatgtcaagcagcacaacatcgtcggcgtctacttcaacgattcggctaaggtgagcgtagaaagcaaccatgaaatgggcgctggcggtgtagtgcgcacgtacaaccatttccacgccgttctgaacaataaattcgtcctgcgcggcgaagatatcgcctccaccaaaggcgaaatttcccaatccattgaagtgtttgagcgcagcatgcgtgagctgactatggaatcggctgaaatcgtcctggaactgatagatcagaattctctgtatcgcggcgaagagcatcgttcggctgtgcaaagttttgtacagagcaaaaccgaatacatgaaaattcgctccgatctgaaacaactttgggcctggcgaactggttggttgtccaaaaaccataagccgtttggcatccgtaatactgtcatcggcaccctgctgactgatctttctgacggcgttgaaatggaaaaggcggtgaaatcctttgaaaccaaagtcgccccgaccaactaccgccgaccaactgccctggtcaccaaaggtatgatcgaaaaggcacagaaaacggttgccgaactcggcctgactgaatctttgggtcgccgctatgcgaattatgaagacctgacgatcaataacgtgctgttcgccgatatcgatgcgcgtaaagctatggatccgttcgaccaactggcgcaggaagtcaaagtaactgaaaagtcgctgggtaaaatcgaagagatcagcgtcgatgatttcatcaaaaacgttatcccgaaagcgcgttccatggaagtgatgtttgaaggccgtcacaccgccaacctgatgtctctggtcgctccggaaactcaaggcgctccgggtctgttcaaatggggtaataatttctcctggtcctacaacggtgaagttgctgattccatcaaagagcgcgtgaaagccgctggcggtaacgttgattcattcctgcgcatttcgctggcctggttcaacaatgacgacctggacctgcacatgtataccccgacgaacgaacacatttatttctctcgcggttgccgccgttcttaccatactggcggtgagttggatattgacatgaacggcatggatgggatcaacaaagagcgtaaaccggttgagaacatcttcttcaaagacaagaagatgctgtgtgatggtgtgtatcgtttcatcgtcaacaactatacccagcgtgaaaccatcgacaccgggttcatcgttgaggtggaatatgaaggcgacctgaaacgtttctcctgtgaaaaaggtctgaagaataaacagcagatgaccgtcattgaactgcgtgtcaaagacaaaaaggttgttgaaattcagtcttccctggtgccgacaactggcgtggaaactgaaatttggggtatccgtacccagaatttccagaaggtacagctggttctgaattctccgaaccactgggacggtgaacagaccggaaaccgccatctgttctttatcctggaaggttgtatcaacccggctagcactcgcggcttctacaatgaatatctgaaaccggaattggcaccgcatggcaaggtttttgaaatgttgggcgctaaaatgagagcagaaccgagtgataagcaactcagcggcctgggcttctcttctacccagcgcaatcatgttctggtgaaggtgagcggttcatttaatcgtgtagtcaaagtcgtcttttaagttaaaatataaccgaattcaattgaggaaacaaaaatgtttgataaagcaacccgtctgaaactgcgtttcaactccaacaaaggccagctgtccgttgagcaggtgtgggatctgagcctgactgctctgaacgaaatggcgaaaggtctgaaccgcgaactgaaagccgctgcggtcgacgatgaagatttcatcggaaacaatacatccgtcgactctcagctgcaactgcgctttgacatcgtcaaaagcatcatcagcaccaagctgaaagagcgcgatgatagcctgtccgctgcggaaaaacgtgagcacaaccaggccatcctggaactcatcaagaagaaacagcaggaagagctggcgagcaaatctgttgaagaactgcaagccctgctgaaataaatccactaccctttggcgtgataatgaaccccgccatgcgcggggtttattttaggtgaagaatatgaaaccagtcatttgcgattattgtggaaaggctgctgtactcgttagtggcgacgcaatatacccgcatcgccctgacctccgcaatctgaagttctgggtttgtaccccatgcgacgcccgtgtcggttgccatgcccatgggaacgggagacaaccactaggaaggatggcgaatgccgctctccgtgctgctaagcaggaagcccatagatcgtttgacccactatggaaaagcggagagaggagcaggagcgacgcttacagttggctggcgcataagctggggattaagaagcgcgattgccatatcggcttgttcaatatcgatatgtgccgtaaagtagtgaaggtctgtaaacaaatatcataggataacacatgacaactcgtactggtatcaaactcactcctgaagtcctgaagtcacatatcgctgaggtgatttacgaagaccgcgaagtcggcggccaccgggctatcacttgtcatttcaagatggataacggcttcgtcgttcacggcaccaagcccagcacatccatagacccggccaacttcgatgaagccatgggcaaagagatttcctacaataacaccttcgaccagctgtggcagctggaggcgtaccgggcgcttgttgaacaagatctgttggccaaagccacggaaacgacagagatacagatcgatcaatacgctattgaacgtagcgccctctgtccggcctatcacctcggcttcaatgtgatgattcaggaagtgatgttcaaagcggaaaatggcgagcgcttcttggcgtctttcgtttgtgggccggatgacatggaacttgttgttgaatctcacaacgccaaatctcgtaaggctgttattgatttcctgcgcgccaactccaaactcgatctcacttattcgccattggttctgcgcatcgccaagatttgtcatgaagccaaccgcgcatactgcaagtctattggtgacgactctcaactgccttgggaacaatctccggcctggcagcgtgagagcgcttgcaaaggtgttatcttccatctcactggtgatcgtaagcccagcgaatcgcatgagagatggatggcggagaaggagtctgagggatgggtgtatggtccagtcaaagaccctcagaccaagcaacacccttgcatggttccgtatggagaactcccggtacaacaacgctccaaagattatattttcaaatccattgtagactcctttaaataagctctgaataatatttcaacctgtcaataatataatgcccggttatattcaatcgggcatttttattatattaattgacatcaataccgcctgtcgtaatataatagtcccatgttgaaatagttgggaaatataactcacgagagcctgatgaccgacaacaaattaaaacgcgccggacttgattgtcttgacaattcattccgtcccagtgatgttctggtcgcccaaatggaaaacaaccgggatttcattgaaactatgctggagaacgccgacgcgaactccaaacaccccaaagcccaaaaaggtcaaaacgatgattgaatcattaacatttaagaatgcggttgcgaccgtcgcgccgtctaaccatgtaatcgttgtagatatctccggttccatgtatcgttcacttccagaagtccgtaagcatctgaaggagaacctgccttccctagtgaaacccgaagatactgtgagcatcctttacttttcatctcgtggtgatttcggaacggtatttgccggacgtcagatcggtgtcgcatctgacctgagcgagctgaataagctgatcgatcgcttcctgcaaccgtccggatgtactggctttgttgagccgttgaaactagcgatggatactgcgcgcgacctgaagaaacccggctacgtcaacaacctggcattcatgactgatggttatgacaactgctggcgctccaatgaaatcctggataccgccgaaaaacttccttccgcgttcgacaacgttacgttcatcgaatacggctggcactgtaaccgtgaactgctggctctgatgtctgagcgttctggtgcaacccacgttttcgccgaaggccagactgaatatcagaccgagctggaaaacgtgctgaagtcttctgtaccgaaagtggttgttgatgtacccctgctatacacccacgccatctatgttgaaaacggcgcggcgaccgtgctggcggtacagccggatgaagatcatcctatcggccacgtgagcatccctgagagcgtcacgaagctgtgggtcgtcaaccctaacatgatcgaccagcttgatgcgctggcggacatccaggcggcatacgtgctggcgttctacggcgtacacatcatggacgcagacctggtatgggctgcgctgaagaagacgggcgacgttcgcttcatcaaacagtacagcaactgctttaccaagcaggactattccaacatcaagatcgatctggttcaggcgattgttgacgaccagctgcgcggcgttgacggtattgactatgacctggttccggctgaagatgcgacgaccgtcgttgacgtgctgacttacctggcgggagcagacgcacaactggttgttgaccatcccctgttctcttacaagcggatcggtcgcggtacggtacaaaaagccgacgataccgaagacaagctggcggcagaaattgccgaagccaaatctaaagaagagcgtaaagcgctggccctgaaactggctgagcacgaagactggactcctgtgtttgagccagtgaaaggcgcgggcgttcctatcagcaatctggtttacaactcggcccgcccgaacatcagtctgcagactgtgcaaaacgggaccgttatcatcccgaagttcgcacaaaagaaatacgatctgcctgaatctattgacacatggcagtggaagaattacaccatcgtcaaagacggtatcatccatatgaagacccttcctgtggtctgctcggcggaaaccgtatctgaactggttagcaaaggcgttgaagtttacggcggcccggaagtgttcatcgtaaatctgggcagcgttcctctggttaaccgcgcgatggttaagaacatcagcgctgcgcagttctttgctgaccatgtccgtctggaatccctgaaagccaagcagaaggttctcaaatacttccgtgacgaactggttgggaaaggtaatgccgtgggcctggcaggcaaatacggtgccgaagcggctgagtttctgtctgcgaatggcatccgcgattacggcttctctccgaagaccgcttcggttgagtctactgatttctacatgagccgcgaactcaatgtgaagatcaaaggcgcttcctcgctgccgtcaattgccgccgttctgaagaaacaggccgacaacaaaaagctgaacgcagctgatcagctgatcgctaatgcgctggcagaatacaacgcctttgtcaaatctccggcggtgactgcagtcccggaagcaacgcagaccaagatcattgaatcttggatcagtgacgctgccaaggccgcaatcacccaagtgcgtgagctgaacaagaccctgtccaaatccctgtatgccatcgttgctggccatggctggttcaccgacctggatctggaagagtccaccatggaagtggaagttgacggcgtgaaatacaccgtcagcgcagtgctggaagagaaagagatcaaaatctaatcaactgtgccggggaaacccggccttttcataaggtataccaaatgtctaagaatgtgtcttatatcgatgtcatgcgcttccttgtccagtatgcaagcgacaatctgaatatggaattatggcgtgagaagaaacactccgtaacaatacaatccgcgattgaaaaaatcgaagaccagctggataccctggctcctctgcgcgtcaaagaacatctgggcggcgatgaacttgacgcgatagaaatcatcatggaactggaagaagaatatgatgtagagatcacggatcattggatcgggtctcacaaagacgacccaaccctgggtgaattggctgaacacgtggttcacctattaaaataattttgaagttggctttacttcttcaataaatgatttaatattaattttgtagggcgggaacggctcccgcctgattgaagaaggtgctatattatggaacaactactccccgaatccgtatgcacatacgttctccttgcaagtgaaggtgacgaaatggccacccaactcactgacctcatcctgagctacggtatcaagaaagtcaaccaagttgataactctggtgtgaaaggcgactatatcgttctgaaccaccgcggtctaaagaccaatccggtatttttcgtcggcgttcataagaaagatggccaggaagtcgtggagatcgtatcgtgagtaataagaaagtcgaaaccacggttgaaattgaaaagaattggggtttccttcgtgctaaaggtttccgccgtgtgtatgctgcgaaggaagtctatgtccagcgtaaggacattatcattagcaagaagggtaagtcctgggtggcagaagaagtggacgaagacacggcatcgtaggcaagattaaggccaaggccgaaatcctctttgctctcctgaagcaaattagctaaaatcaatatcgcggacggggtaaaattgccccgtcaatttgaagagactatatcatgaaaaaattaatcattgctttggctctggccagcctttccttcgctgcacaagccgatcgtgtcatcaagggtataaccactgatggcaaatactccttccaggcatttggttctgaccttgtcctttataatggtgcaaagcggctgtatcattgccgttacgacatgaccactcgcgggattgataaagcagaagatccatatgtgctggacatataccagtgtgggaataaaactctgggtgtcaaaaccttcgggaatatcgaagaaggcggttgggtaacggtaatcgcgaccgtcaacaataaacctgtcactgtattccaagagtcatttgccatattcaccggggcaaattcattatgatcaaagaaggggctgtaaaatgattattaattgggaattagtcggattggtgctcagcattattttcggtgtggtgggtgtagtttgggtaatcattggcatctggttctatcgtttattcaccaaatatgagaaacgtgatgctgaacgcatgaaacgccaagaacaaatccgcaaccgccgggagaactggtggtgatggtcacaataattgggtatgggattattgggttagtcctattctttatcattatctgtttcactaaacatatgcgctaactaagggataactccatatcccgaggtgtgccatgttcttgacttcctttatcgactggttgaatatcatcaacggcctgaggattcctgtgggaaacctcgggctttctcgttcttctatgccacaaattgacgctgataaacagcaagacttccatgattatctggaggcgaatggcgtgactatagatgcatctcaagtcccgatccggacattgcggctgactcagaatgagatcaacaaaatgaaagtctggaagatcatgaagcagatcaggaacaagaagccgatgggccgggtttgggtatcttcagacaattacgttgtggatggttcccatcggtttgtggccgctctgaatatggacggcaagcagcgtatgaaggtttacaaagtagatttgcctgctatggagtttgtgaaattggccaggcagttcaatggtgtgcgttacagaacagtttcagattcgagatactaaaatggatttttatttggaacttgtaagcatcggggcgaaaccgcatttcgtcaagaaatatctttcgctcctttcttcatttaatgattatcgcggtgatggtgagaaacaccatatattaccagtatcgttgtttccagagtacactaaatccagtttcaatatagttaaattgccttatagggttcattatattgttcatttatgtttggcgcttgcattacctggaacttctatggtcaacgcagttatgatattaagacgcgccgacaggaaggttaattctcatttattcgcaaagatgcggaagaaatttgcacaaagactttctgaaacaaataggggtgaaaataaccccatgtatggtacaaagaggtctaatgtggcgaaggaaatgacttctacatcccttttaaagttttatgaagagaaaaggaagagcgaccccgatcttaaaatgttcttttctgaaagaaattctaaagtaaaacggggtagggaacatcattgttatggtaacagattaactaatcaacttactacagagcaagaaagaaaacgagtagaatcatttaccagggcttcccgagaaaagatgccttgggagaaacctagatggaaaccagaaagagatcaatggtggtgttgggctgctcatatacattattatctgataacaggtaaaagtagaggcgaagccctaaaggaagtgtttggttctaatgatgccgaaatttggtcacaagttagacccatcatgcttagattagacagtggatgggatccgttaacttgccataaatggttgaatagatacggaattgaattccagtgaaagtttctgaataaagaatattattgaaatcctttactcaataaaccttccgaactactatttcctcaatgaacaagagggaatcaccatgaaacgtttaatccttggggtgctgctggctggactggcgctccccgccgctgccaaactgaactccacaggtgagaaactgtgggaagatctttcttactgtgctggatggtctcaggctgtcgccatagacaagactggttctatcgagaacttttctgaattgtggaacaccgggaacgtgactgacgctgttgtcaacgccggaattgaatttaatcgatacaaacaaggagcctataatctcaaaggctacctgaatgacgataaattcaacaaaggcgggatggatgcctcagatttgatcatgactgggcgtatgggtacggcagggcggattcaggttagacaatgccgttcgcttcccatcccggcgcttcagaaaggtgtcaacatcgggcgtcaccatcttgatctcattaatgatgggaaccagtgcgtcaaagtatttgaatacagtgctgatcagatcaatgatcctaaattgaagaaagaatggcgtactcgtgctctggaacttcgtgcttggctggtcgacaatgatcgttatcatcaagaccgggttgatgccgggctgaaagatttatcgaccaatttgtctgtaaatctggatgacccacgactgtcccgggaacttcagcagactcgtattgactgtgaaaatatgatgaaggagaacgaatgatgcgtgtgaaaaagtcgactatcataatcttctacctggcattcgttgcagtctttgtggtctgggcaagcaatgcgttggcagtcccggcgaacaatctgaacaaatgcgctgcatggctgtcaacgtatcaacagttccatcctgacgataaagatacttctattttgctttccgattttgaaggtgaaatgaaacgtttggaccagtacagtactgaccagattgagaatgctctggatttaccaatgatggattccgcagcagataacagtcaccaaactgctgtaaacctgtcatattgccgtgagattgcgattaactttacccgtaatcaaaaataaaatcgggttaaaatttaggctctaattgaaaatgaccggagtactttaaatgaccgacaacgaaattgcccagatcattaagcagcattcccgttttgctccggatgctgctaatgtcatcatagtgcacaaagacggacgtgtattctttgctgaaaaatttgagcaagggagccagttctgggatgcgagcacgatgcttccacgtaccctacaaggtatcatctactcctgttccctggtagcgaagcggagcgatgccggtcattgggttagtgttaatgatctcggtggcattatgggtgggaaagaatatccgaccaaacgctccccgccgccttatgtcaaagaacagatgtccaagattaccaatcgtccaagaccgaccccgaaagaaccgaaagaaccgaaagtcgaagtcgttcctgcaacggctgtagaaacaaaatcagccaaaaagggtactgattggcgttctgaatttatcgggattaaagaattggattgtgaacgtaatcctcgcaatcatccattgttcgtatcaatacgggctgatggcaaaatcatcctgagcaaaggtcttctggataaaatcgatggtaattttgattttctggtgtctaaggatcggaaggtcattgccctggtgaaaaacggttctatgtataatatgaacaaatcggggaattactctcacaaaggtctgcccaagtatctcaagttcccagaagactccggtacagttcgaatctatatggactgggaccaagaaaagaacgcatttatcggcagtctataatatcggggcggttataatgaccgcctctttgatttgaaggaatatattatgcacaatgtaacaaaactctatccgatcattatcggggccgaccagggagatctattcttacgggatgaacaatttgtcgctcatgccataagccctcaagggatgtctgtgtattgcgtagagcatccagatccggccgaatatggtcttttctatcatgtgaacggcatgctacaacctctcccagatgactatatcatccgcgcacgtcgttacttcattgacttcaacagaatgcacaataatgagattgacgctcgttggcatgctgcccggaatttagtggagtccaacggtaataatgcgtaccggatcgttcagttcgatgaagaaaacaagaccatcacgtggagtatttcaacaactcgaagtcgtccgcgtgaagttgtaacgccatggatgcacaaagagcagattcaggtttctacctccgacttcctggaagttgaaaagcagtgtaatctgaatcgtatttctgtcgtggcgaattctgattacggtgaagagctttattggactgcgttcacaccgcgaactactctgcgtatgcatgccaaaacgcgctctcgcgctgttatccaattctgtctatgggatctgtaccgccagaactacggcatgctgatcagccaggatactgctgattggttgctgatgaaccgtgggcgcattgattggggtgcattatgagcatgctatttgatgtctatctggttcatatcgccgctagtcaatcccaacgttctttcttcgtgctgctgccagcagataaaggtatgggtattgatgacatatccactttagaaaatcaattctacgaacattgtcatgacctcgggtatctggttaatttcaataaattgacggacgagatcgccgcgcaagaaagtgacggtcttcgacttctttcacggtctgaattacaactaatcaggagtaaacatgagcagccgtatttttgatctaaaattccgcgtttggcacgttcctcaggttcccgggaaaatgtttacagttgaagtcccgacgtatgctgaagctgaacgtttgaaatcggcgctggctgattatgatctgttccagtatcataacaacatcaagcctgattattgcaatgccagcggtattcagatttatcaacacgacctcacagaagaagagatcgaagaaatgggccttgaagatcgttgggtggatatcgaggatgaccaagatctgcaggattatctggatcacctccgttctactggttgggaaataaaatcatgaccatgatcagttcttatatcgttcaaaaaggtgatacccttatggggatctgtatgaaattttattcggatccctatatgtattcagatatagcgaagtacaacaatattattgatccaaacaaaatttgcgtcggccagctgattaaatttccccggcctgtcaatgacccacaaacagtcgttatcccggtagaacccactcagaaatgtttggatgctatcgcaggcttattccaggaaggattttgtgatggtcgtatagaaagagatatttatgccgtcatagtgagttcggctctgaaccaataatttattgggaatcggcaaataagtgctttattcaataatttttgttaggtaagctgtaatcctcttgtagtgaacacagaagtaaacatttaacataaaccaactggagtaatccgaatgaatcgtcaagattttatcgcacatatcgcccaaactcagggtgtgaccaaaaccgaagctgaaaaaactgtcgcgtcctttatcgctggtatcaactctgccgtcgctgctggccaatccgttcaactcgtcgggttcggcaccttcgaagtgaaacatcaggaagcccgcgctggccgcaacccgctgaccggggctgcgctgacaatcgaagcgaaaaatgtcgtcaaattcaaggtcggcgaaactctgaaaaacgtcgccaacggcaaataaaacaaattcggccagtaccagggcgcactgcgcaggcaggtacaaagagaaagccggggtaatccccggctttttcgttcttgggattcgggtaaactatactgacacccccaaaggagaaatcaagtgacagcatttaaccagcatgccagagcgctggatactcttcgcagagaaataccgatagaagaaatccagaaattggccgaacgatattttccatatgaccacgccaaccccggccaaatggaatgtattgttgaagccatagatgctttggccaataagaaattcaaacacgtgattatcgaagctcctaccggagtcggtaaatccctcatcggcacaactatccatcaggtgttgcgccaccttgtgcttgaagcaaacccctatggccaattccgtacatccatttccacgccgaccaaaggtctacaagatcagtatgcggctgaaaaagctgttgctatcgatatcctgaaaggcaagaagaattatcgctgccatatgcacccggatatctattacaacgcagtgcaatgccgtatcgcttgccgggatgggcattgtagtaagaggcgttgcccctatgtccaggcacgtaatctctggaccaacatctcttcattacgctgcacaaacgcagccatgatgatagaaatgtgcaccaccatttgtatgaagccagaaaaccgggccgacatgcttattttggatgagtgccataaaatgccctctacactcctagaccatacgatcatggaatacaatacgaaggtattggaaggactgagatcgttgcctcaggggaaggatatcgtccaggcagtggttgagattgtatcccattgcaaagactatgaattgggcaagctgtattcccttgatggttatctgttcgaccgttttgtagacttgttaggaaaggtggaagccattttaacagaactgcatgaactcgttgaagatgaccgcctgaccgaagcccaggtaatgaagctggctgatattatcgacaccctccacaacctatctgactattgtggtatcatgtcacagacccaggcgagtacatttattgtacaggagaaaggagaagaattcatccgattcaaacccgttatagcatcggatgtgtctgaattcgggcttttccgcaaagccgattatcacgtacatatgtctgcaaccatatgtggaattgatgcgtatgctcgctcattgggtattcgtcctgggcagtaccataaaatacagatagggaacccaatcccgattgagaatcgcaaagtcaattacatgccggttatgaaaatgaccaacaatatgggtgactatgagatgcgtcagctggccgggtttgttgacgagatcatacaattccaccaagggcaatccggcatcattcatacggtgagttatgaccgggcgctggcgatacagaagttcagcaaataccggaatatcattcacgtgcccaggacccgcaaggctctgatggaactgatggataacgctttccgtacgaagacgccttgcatcatcgccagcccggctatggaagaaggatatgacttcaaaggggattacagtcgtttccagattcttatcaaggtgccatatgattaccttggtgacccattagttgcgcatatcaactctgtggacccatcggcgtatttccggaatgccatactgcgtatcatacaaatgtgtgggcgttcggtcaggggcgtgaacgactgggccgcgacatacatcctggattcttcctttgaatccttgatgatgcgcaacccagagttctttccaacttggtttaccgaggcagtatttgaagtttaataaccagcaataaatgacaggcgacatttgagattcggtgccagggatgtcagggatatgatcatatcatcgctgtccatactgtactcaattgtcgccagttgctgggtttgaacattgttgtattcactgtagatcaggtcctcaccacggaaaccgatttttccatctgtatcttgccaatgaccttgtgttttgtcatacacatggacacggaattctaccatatggaaaagcgctttcggtatacttttcaatatactggtgccgacgactgggatctcaatatttgaatcattggccccgccttcataaactggcgtccaattgaatataggatcaccaccagcgaccggagtccttttccaatattggaattccgggttccctgaatcgtttttctgcaacaatatgacttcgccacctgtaaaattggtggtgtcaatatcgtctcttgctaaaatatccgccggggagccgataaatttccagccatcacgatccaataatgacttataatagtctgtgaaaacgttgctgtcgccagcattgttgattgcgtctttgagaccttctcctgtgaccatctcattgactttcaaccacatgtttttgaccgcagacgctgccgcaacctggcctggtgtaccgcctgcagtgtagtcatagatgatgtctacattctgtattgcggtctgtatggacaggagaagtcgttcgatttcagctgcggttaaactgaaacgataagaacgttcagccataataatgtcctcatgataaacaagtttggagtatttatatcgtgattgaaatttacactgacggcgcttcatcgccacagaccacacaagcggcgggatgggcctttgcagtcagcccgatttctggcggggcacaatggaatgtattctatggttatttgccaccgccttctacgaataatatagcagaactcttgggcgttattaatgctctgaaactcctttggaaattttcgggttgtggtgagcgtaatattcccaaagcgacgattatatctgacagccagtatgtcatcaatagtgccaccaaatggcgttcgaaatgggaatatgagggcatgcctcccaagaatactgaattgcttcttgatttgttcaatatgtatgacaaagtttgttcaatttgtgaacttgaactaaaatgggtcaaaggtcatgcgggtacaatcggcaacgaaattgcggatcagtggagtgtccgggccaaagaaaatagcagtatggtcctggaaaatgagcgatttcgcgtcaagaaagtcgtcggttcattcaatcaatttatcggtatctctgagggttagatcatgggcatgaatttcgtagacagaggggaaaacgtcaccaaatatttcactgacgaagacaatgagcgtgtcatcgcaatattacgtgactggatacccggaaggaaaaaggcgatagccgaagggaagcccctacccaagatcccaaattatgtggccactaaagtccatatgatcatccagaaaatgagtacccgttacaactacagagattatcctttccgtgaagatatggtgagcgatgccgtcgccaatattcttcgatatttacacaccttcgacgtcagccatgtcggcaagaaagggaagatcaatttcttctcttgggtcaccatgtgtgctgatcgttcattcgcccggaaactgacaatcgaagaagaacacacatatatcaaattgcgttcattcgaagacgcgggtggctttgcggcgttcagtgatgatccagacttccagactcagacatttgttgacaacaccgggattacaatggattttcgtgagcgcataggccacttcgaaaataagaaagaatcccagcgtgaaaaggaaagacaaaaacaagccgacctcaaagaagacgaaaagaacaaaaagattccaaaaggtatacttcaatgtcttcgtggaccacaaaataatactaccgcacaggccgaagatgattcagaacaagacttcggcaaaacccaattcagccttgaagaaataatggatagccctacgctgctatccgaattatcaggagaaaagaataatggcgattgctaagatcggcgatttacacatcgggagccgtaatggctctcgttatgttcgcgacttcattaagaattatctcatcaactatttcattcctgaactcgttgatgccgatatcaaagaagtctggcaattcggtgacacatttgacgtccgtaaattcatgtatgggcgcgacaaagattggctaaaatatgatctggccccggcgttgcgcgctgctggtatcaaatggaatggtctgatcggcaaccatgacattactttggaagagtccaaccgcatcaattggccttcttatttggttgaacttgctcccgatgtctttacttactactcagaaccgacggaagttatggtcgagggcaaaaaagttctggtgcttccgtggatcaacaaagagaattatgcgcggtcagtacagatgttgcaagacactgatgcagagttctgctttgcacacctggaactggctggtttcaaaatgtatcagtcctccacttgtgaccatggccagatcgatttgtctctgttgagtaagttcactcgtgtagacacaggacacttccacacccgttcgtttgaagggaatgttcagtatctgggaacgccgtatcatctgacatgggaagaccacaaagacggggataaccgtggattctacgtggacgacctgacagaaggtggtgagctgttcatccccaacaacgccagccaaactctattccggtatgtggaatatgattacaccaaactttcatctgatgacgaaggtaattggattgatccggaatggctaaacaccaagttgggtattgaaggacagatcgttaagattatcgtaaccaatcgcgataattctaagcattacgagaagttctgtgatgcgatgaagcgctgtaaatgtattgactacaacttcatcgataagaccgtgactgtttcggctgaaaaggttgaagtcaccgaagaaatgatcgcgaccgatgccgtggaagttctgaagaatgatatccgcgctgctgacaatatccagcgcccagaatcggtctgtaaactggcagaagcattctatacagccgcccaacaacgtcttaatactctggatgcataacgatgacagatatccttgaaaaatttggcaacctgttaaaagaagctgcgacgccggaagatatcccggttccatttgatgtgcgtggtgatgttacccacaaactcaccttccgtaaggggcgggcgaagaacttccgttctattggtaatgaattcatggaaattgattaccaacgaaacccagcaacgctcgtcacatctgatgataatggtgccgggaaatccactatgttggtctggctattattctttgttctgtacaacgatacttacagcaagaaagagaagaaggccgggctggtaaattctcagaacaaaaaggactgcgttggtgaagtagaattcgcctgccggggtagtgaatggaaggtccgccgtgggatcaaacccgactttgttgaagtgcatcagctggttgacggggaatggaaacaggttgtaaacgaagcggctaaagccgacatgaacaagtatatcgtcaacctgatcggcatcgaccagaagatgtttgagaactccctggttctgggtaaagagaaattcatcccgttcacggaaatgtatacggctgaccgccgtaccatggtagaagcgatatgggatctcggcttcttcagcctgatgaacgaagacgtcaaggcaaagatcaaggtgctcaacaaaacgttggaagatatctccaatgagtttggtatgaaaatgattgatcataccaacaaaaagactcagctggcacagatcattgaatccaataaccgcatccaacaacagtctgccgaaatcctggagcaggaacggatccggctttccagtctggatgcggatatttcttcttaccaagatgagatggcccggctacaggaagtcgaagtcaacaccaaaaaggaaattggtgaagtagaaagtcgtctcaatcaagaatctactgaagagatagaaaacctaaaggcacaatatgccgagaagatgaaagcagtagatgacattgcatcagataaagctgaggactatgagcgtatagaattgtcttcggctgagcaggcgcttaacgatatccgagaccaaacccgtaaggtcactgaacgcaaaaacgaagtactcaaccagcgcaatgagaatctgaatgttctcaacgaagcgatggaaaggatgcgttatggcgaaggtttcaggatcaaattccaaaccgaaaaagaagggtatcaggaatccattcagaagttccatgatatgggtacttgcccaacttgccaacaagaagtatctgaagaagctaaatcccaggtccaatacgaaggcaacatcaaaattaaagatgtagattcccgtattgaacgactggaaactatgctggaagaaatcaataccaccatagcagagcacaaagcgaaggatgatgaatttgttcgccaagtcgctgaaatcgatgctgagttaagttctctgcgggatcaagcggcagaagcgcagaacggtattgaaacgattaaacgggatattcaagagttctacaaaactgctgaaattgagaaggcttctcttgaccgtgaactcaaatctcaaatcctgtctaaccgccaggctctgaacaccaggttcgatgacattacggcatcattacaacaaacgttagagacagcctctcaggggcgcgcaactgtcaaggataagatcggcgagctgaaagcccgtcgtgcccctctcgttgcttcgattgccgatttggagcgtaaactatccgtacagccgactccaactgccgacctggaagcagtcattgcaggtattgaacaatctctgaaagatctggaagaacgacgccaaacgacagatgaagaacttcaggatcataatcatcttctccacttcttgaaggatgatcagaccaaggcccgcattatctccttgtacctgccattcttgaataagaagatcaatgaatatctggaagggatgaatatgttcttggacatttctgtggacgatacgtttgatatcaccatgggaaccgccgggcgtaaagggcaaagtctcttcagcttatcttccggccagcgcgtccgtgttaacattgccatcaccatggctctgcgtgacgtcgctaacctgaaagcatctgtccaatgtaacatactggtgtttgacgaagtgctggagaacctttctgagcggggtgtacaagaatgcattgagatgctgaaatacaaattcagcaataataatctcttcgtcatcagtcaacgtgagcaggaattccaggaatacttttctcataacattcgttatgggctgcgaaatggtatgacccaggtgatcagcaaggagtgattatggaaagcgaagcattaaactattttctatggtccgtggtatttggtgctttctttgttaattcattgttgacaaaagataagatccagatagtcgtgtctggtatcatttttggaatgaacataacatacctgatccatgcattgttatcatgaaagtcgtccatttcaagaaggaaccatatgacatctacatcgggagacccggaaaatgggggaacccgtttgaggtcaaagatcatgggcgcggtaattgcatcgaattatttgaagatgatctttaccgacgattgataaatggagatatcacggaagatgaactccttgaattggacggaaaggtcttagggtgttggtgtaagccgcgcccttgccacggcgatgtttatgtcaaagtggtcaaccgtattaaactattccgattgatgggtaaatcttttgtagagcacttgagacaaacatatgggaaataacatagacgaaatattcgaggcatcaaaaattgcatgtgacacctggaatagcaataacccgaagtttcctgtggccattggcgttatttcataccatcttgaaggatacgtgatatttgttgacgggaaaatcaacttttaccgtgatgggcatgaattcaacggattattcaagatcgggaattacaaaacttcatttgatgaccctatggaactggtgtatgcctggttggaatgcatcgaagaatgctataacgccaaatttgaataatgataaagggcgctaattatctggtgccctttatcttttaaccctgtcaggaggctcaatcgagctgcaagtcgacaaacaaataaggaacgccatcatgacgatgacaacgttgaaggccatggctgctttcgtgacctttaccattgccagcgggagtgtgcacgcttcccaaagtacatcacaatgtgactatgatttttctgagcaacaactatccaccatggcgactgcataccacgtaggcaagtcccaatctcttggttacaccctggcagctatatcctggagagagtcccgtgcgggcgaagacgtcgtgtctatgcgatctggtattaaagccgccaatatgggagcatttcaaaacaaagttcaaagtgttggggatcgggaaggatgcaagaacagaaagtgctatgccaatgtggctgtgaaacttttgattgatcaggagtatgctgccaacgccgcgctggatgagatgaatttctggatgaaccaacataatcagaatgtacgcaagtctctttcatcgtataatgccgggcacgcacgcaacagcaaatcgaattcgtatgctgccgatgtagtgaagaaggctaaatatctgcaaagatgtgtgtctttcaaaggcattcccgcgagttcgaaagttgatcctcaggtgatagccatgaacaagcgcacgatagagaaactcaagaggacgcgataatgaatatcaccccatctcaaacaggttatgagcacctcatggtattcctggctattcagggagccaaagagggcatcataacttcagaatacagcgggaccgtccgcttgatcgactacacggccagcgaagcatttatcaagaaatgtatcacagcatggaccaaatatgctgttgggacttacccggcccctcctgcgggagaactgttatttgtcgtgcctaccctggcgacaaccgatactgacgagatctttgccgatatgctgtccaaaggatatctggcttatgacacacagcatgatatctatgacttctcggccttgaatcgggtgttcggttatacgatcacttctgaagcgaatatcccagattgggggatcctggcttggggtaaagatggccttggggcaacatatgcttcatctgatgttggaccagtccttattgatccgggcgttaccatggagcagtaccttgcccaattccctcagcatggcgtgacgggtagcgacatcattatcgtataccctggttctaacgcccttgagcgtcttgtgtccggatgggacccacatctgaaagcagtcgtagaaggtatccggttttacattccggtggtgaaccccacgccttaaaataattcaataaaaggggcttcggcccctttacttattcaataactacccctataattcaatacataagcagtacgatgaaacaaattgaaacgaaggaactacattatgaaaattatcctcgacgcatatatccactacggcaagaaatatctgatggcgaaggtgtacgaaggcgaaaccctggtacacgcccagacccacgaagatgcaaaactccgcgaaattctggcacgtgacttccccggcgttgaagttattgagccgaccaaccaggctgaagttgacaaagagtgggaacgcgaatggagtccggctgcgttggccatcgctgaaaagaactggaacaaccgtgaaaacgccaaccgtccgtttcgccgttgacacaataggggctataatgcccctttcctttcgctaattaatggaaaccgtccgttttattatcaggagaaccaccatgtctacaccgaacttcttagatttcatgaaagagcgcgaccagttggacgaagcgttcaactcagctccttatgaactcaccatgggcaagaaaaatgctggggacgttttcttcaccttcatcgacgaagacgataaagaataccgtatccagttctataccccgcaaggtctgggtaaaaacgtccgccaggtctttatcggacagaaacgtggttcagtttatcctgatgccatcgcccgtttcaagaacccgatgcgcgttatcgccagcatgatcgaagccaccaaacaattcatggcgacgcctctgggtaaaaccatcgatggctatgccgtcaacttctctaagaaagcgctggatcgtggtatgaccctgatcccgaaaatcatccgccaatccggcctgaaacaaaaactgaacgtcatggatcttacctacgcgcctgtccctgaccgtggttatgtttggctggtcaaaaaaggaaaagacccggctcaggtattcgacggtccgaagatgcagggtatcacctgggacgacccggacaaagtcggtgacgtcccggttcagaacaatactccagatgtgggggcttcatcttctgttgatgattccaacggatggaaattaacttcaaacggggatcagcccatgttgatatgggttggtaaggagagaggccgcatgaacacggcaaatatcgctccccactacaatgagccaggcgtgtatgttggcgcatacatgaatgagaaatctgtgcgtgggcaaagtgctgatttcattgctcgtcagttgaaattaccgcaagtccctatcagtatcctgaatgatttcaccacggcgtccacaaaattttggaaaggttctcagcagaagtccgcgccagctgactccaacaccactattggtgctcggggtgtgggaaccggggctggttcttctgaaatcgaagtcaaccgcgagtggtacaacagctcggacactggtctggagttgaagagcgggcgagacccgattcgtggaaactacgtccgcctgatgagcggttcgaaagaagtagccgcattctatggttataattttgacaaatatccagacggggctgaggtatcttggaatatgaagcgcggcttcaccaaccaagacttggtcggtgcgtccatgaccaaacagaagaaaggcatgtacgatcagtacactttcaagaaaggtgctcagataattctggtggtggacgttgacaccagcaatgacaccggcagcgatgaacttaccaaatccaagtggctcaatttactgaattacattggctacagtaaggcagctggcggcaaattgtttggtgatgatgaatacatcaagaacttcgtgaaagaccgttacaaactgactctgtcaattgcgcgacgtaatcaatcagtccagatgtctgttaatgcctggaacgcaacagcagaaaaatgggtagcattcccgccatctgtgggtgtgttagaaaatgttgacatcagcgatccaaaacgattccccaagattattgatgattttgttcaaacagcaacggactacgttgaaaagaacttggagaacgtcgtcgttggttggtataacaaaacggcacctgctggacaaccagtattggagttccgtgagaaatcaggtatgtatggtggtggtatcaatgtgataccaagttctggcaccccagtatatggtgtgtattacggtgcttcctcaaaattaagatcctttgcagaagtgtccggctcagacttgggtgtcctggccaaaaccttgaaactcccaccgattccgtctggtgtggctaaagagtttacgaaggcggcgactgcctggtggaaacagaaaaatatcaccccaccgaacactgattctggggaacaatccgttttggataatttgaagataccacgtaacgccacggtgtttggtgagactgtcaacggtatgtccatcacttggtccggcatcaatttcccggaaactgggaaatatggtggtgctgtattgacaactaatgtgacctgctactatgataaagacaaagtcgcattcacgccgatgatctcccagaaagggcggctactgaacaatccgaagacatatgaacttcctttgaagaaaactattgttcaagccgtgatcgatgaaatttcttcgaaaatggaaattttatctcggaatatgcaaactctgaaaagcacgtcctataatccgaaacaagtatttttggacgacattgttgtcgacaacaacggttcagtcctttggcgcgggcacgacatggctgatcgccgcactactgaattcatgttgggtatcttgaatgacgaaaatagtcgtctggagaaggagggcggcaaagggaagacagctgcagacctggcaacatatgcggcgtcgattgaagaaagtgctccaaaggggcgtgaccttgattggcgggtatacttaaccaacaatggcaattccctgcaggttgattgggaaattactttccgccgcaacacacgtgtcggcgccatgaaggaattcagcgctcaggtctaccgtggcaaccgctatctggaagacgtatatgccgatgctaagagcagaggctatgcgccggaacaaccgaacctgatggcgatgtccgatgctcaacgtagcgatgacatggctatgatgaatggcgaagacgcatattccgaatacgagcagtcaatcggcggtagtttgaaaattaatctgaagtaaatgattagcccctgcgggggctaattatgaataaattcttaggagataaacccatgaagacctttctcgaattctttaccgaacaagcagcgcagcctgtgacccatgctggtgtacagggcaaaagtgttaccatcaaaaagcaagctgacggcactcagtggtgctctggtactgttacccagatcactccagacaacgcagctgacacctataacctggagctgaccgatggtaataccgtcaaagcagtgctgaccccggaccaggtacacgcggtgtctcagggacaggaagtcgtagccgttcatgacggtttcgaattcttctttggtaaatctgctgacaaaggccaggtcactgaagcatatgctcaggaactcgccaatatggacaaaatgatcggtaaggcgctgggcgtcggtaaatctcgcaagagcgggcgtaccgaatttgaatattcgggcatccccggtatcggcaaatctgttgctatcgacttcggtggcgaagacgacccgtatgtgatcgtcaccatgggtgggaagcaacaggacatcagcaaaggtaaaacgctggctgttgatattgccaagtacctgggtgtcaagcctcaataaggtgaatttatgaagaattttcaagacttccttctgaaagaagccgttgatcatcgacgcctgggtagacagggacaatacgacattactgatgttggccgcccatcaaagggtgaattgatcgattattatgatcggcaaggtgataagcggcaaggaaaggtcaaatcagtaaatgcacaaaacattatgacattgattgataccaattcaggtgaaactgtcaagctgactttgattaagccgtaatacgctacgatcccccttaaatacagggggatttctttttctgaggacagtaaaatggtcaatgcaagtgcatttatcaaccgtggtctgctggcgatagctcacacccatgctctccacttcgtcacgcattcatattccaaacataaagcgctcggggagttctatggggacctcgaggacttgctggataccttcaccgaagcatacatcggcgcgggcgggacttatactcccggattcgagaacaccaagctgtttaatccagacccaatccaatatatccagagcatcgttatcgacgtcgacgccatttatcggcagtgcgattctcatctccaaaatacgttagacgagatcaagaccctttgctatcagacgctgtataaactgaagcaactggcgtagtctatagactcctctgataatataattgcccattatttgtcaaccatggataaagatgggcaagatcttcgttccaactcatttagaaggctgtcagatttcagccaaatatcttcacaagcagatgaattgcggtgccgtatttgtcgaaccgaatcctcataccaattctgaatcccctgatgcaatcggtttccgccccgatgggtgcagtattttgatcgaggtcaaagtcagccgggatgatttccgagcagatgctaagaagcctcatcgcatcaatcctgagcaggggatgggcagctatcgtttttatgcatgtcctgagggagtcatccggatcgaagatctaccaccaaagtgggggttgttctatttcacgcctcgaaaatcattgaaggctatccatgtccccgacgtgcagatatcttccctgtattctccccagcactatctgaatatgatagcccgccgaagcccgaatggtaagatgcctccttatctcctccattatcaaaagatggtggaagacttcggccatgtcgtaaagaacaccgtcgctgaacacaatatcctctatggggcttggcgccagctctgtattgctcaaacccgtggtgtggcgtatactgtcaatgaggtattccagaggccaaacatatgaactataaaaggatacacgactccataatttccagggcggttaatcggtcactgccttcgggttacacagagaaacatcatatcattcctctttccatgggtggtaaagataggaaatttaatatggtggttttgacagcgtcagaacattatattgtgcatatgttgttggctaagatgtttggtgaagttatgaacaaagcatttaccaaaatgaaacatcttacatccaatccatccaataacaaggagttttcattaagaagggaaatgttatgcactatttctggaaacaacgctaaaactgaaagaaacagaaaggctcattctgataaaataaaaggccgaaaacatacagaaattacgaagaaatctatttcggattctatgaaaggggttaataacccaatgaaggggaccagtccttggagaaatccgactaatataaaacggggttctcataaaaattggttgatagcggataaaatatacgacaaatggtgtaataacaaatctgttagagtcatagatttactcaatggaaacgatatgcagacttcgtatacgacagttacaactatgaaattgaaattcgaagctggctgggttcctaaagaagacgaagattggattgtctttgtcaaggagaacaaacgtgaaatttcttgatgaacaatttatcaattatcttgccccgagattggaaaaatttgtctgggaaagaactggttccgttgcgaaatttcgttgtcccctatgcggtgattctcaaaaacacgccagcaaacgtcgaggacatttcttctatgaccatgatgaagatgtgtttagatttaaatgtttcaattgcaatgagatgagcggttgggcttttgagttctggttgaagaaattcgatgaccgtctgtacagcgagtacagcatggagaagtttaaggtcatgggggacacccgcgcccgtccggtgcaaaagttggcacccctgaagaaactgacgcagacggcacgtatcggtcagcaggtggcgaagagggatgaggaccacctcggcaatatgatccgactagatcttcttgactcaacacattttgctcgccgatatgtggaaggcagggggatgccggagagcgctctctctttgttgtatttcagtgagaactttaggcaagatcttctcaattttgagactgacccagagaaacagaagaagatccctgatgaccccagactggttatccccttctggactcaggacggtcgaatgaagattgtccaagggcgagcatttggtgatgacctcccagaaggggtgttgcggtatgcaactgtcaaaccgcgcaatgaggacacgaaggtctatggcgaagaacgcattttgatgaaccgggtgaagttagtagttgaagggccgctggatagtctcttcttaccaaattgcctggcgacggcagatgctgatctattgagcgccaagggggatatctatgtccctgacaatcaataccgaaatgctcaagtctgtgatggtatccagaaaatgattgacaagggcgtcaaggttgttttgttccctccggatataccatggaaagatatcaatgatatggtgaatccgaacaaaggaaacatcccgatacgtgaccttctgaaaattatggccgacaatgtctaccaggggcttgcggcttccttacgatttgccgatttgaggaaagtgtgatggatatgaaagaacttgataaactggatgaccaggagatcctccggggataccagcaagcccgagccggatatgttctcagtggttatgaatcaccgagtttcgtacatggatggcgtaatggggtagttgattctggggtgtgtcagcctgatgctgaccagatggataccgcaagaaactatctgacgcaactacgcgaacaaaaataattattccctccaggcctctatctacgaggcctcgtaaaataattcaaaaatattttaaatttttattgaaaaagactttactcttcaataaagctggcctattatagttcacatagggcggtaaacaacaccccgccgaatgaaaagtgaaaagcaccaactacataatgaggatttaacatgaaaactatcaaaaccatcatcaccaacggctctgtatctttcgaactgaacaccgaagtttccaaagcagaaatgttccgcattgcacaggaagccggtttccagggcggtaagacctccttcatgaacctgctgagcggcaaaactgaaactgcttgcggcttcaccatgaaagaccagattgtggttgaccaggcggtagtggctaaatcctctgacaaagtcagcatgctgaaaatgtttggcctgaacatccacatcgtcgaagcgaagaccgaaacctacggcaccctgaacgtcggcaaaggccgggtgcagctgaacccgctgaacaacggaacctactcggtgatggtattcccgaaaaaaggctacgacaacacagatatcctgaaagcggtcggtggtgattctaaatctcagtatgtcaaaatgggcaaactgactctgatcgaagtgcagaacatgatcgagcgcctggcataagtcgccaagggggagtttcctcccccttttgaacataggtttagataggagtcaaaatgactgcttatgagatgtgtatcaacaacattgcattacagattcacaaactgaaaccgtcggaaattaatccggatattccgaatgcgttcgactattcaactggtatttctgccggattctgtaaagatcctaaagaagttgtgtgtgacatagtcgtggcagtcggcaaacttgggaagaaaacagatgagtaatgaagtccagttatccgaaggcgccaaatggctcgtgaagcggatcccgaataagaactttgaggcgttccaggctgaattggtcgccgtgtttgagaagtatggctatgacgagcaactgcgtctggcatacaacgaagacaagcctctgatcgtccggcgctgataaagcccaaccctcattcactttcactttaaatacctctgcaaacattgcggaggtattttcttatggccattttaaagattggcagcaaaggtctggaagttaagaatcttcagaccagtctcaacaaaatcgggttcaatctggttgctgatggcatatttggtaaagcgactgacaacgccgtcagggcagttcaggcaggtgccggactggtcgttgatggtattgctggccccaagaccatgtatgctatacgcaacgcaggggagtctcatcaggatcatctgactgaggctgacttgattgacgctgctcgtgaattgtctgttgaccttgctagcatcaaggcagtcaaccaagtagaatcgcgcggtactggcttcaccaagtctggtaagatcaagacattgtttgaacgccacatcatgtacaaaaagctgaatgctaagttcggtcaggcaaaagccaatgctctggcccagctttacccgacgttggttaacgccaaagccgggggatacacaggtggagacgcggagttggaacgactccatggtgcaatagcgatcgataaagattgcgcctacgagagcgcttcctacgggttattccagatcatggggttcaactgcgttatttgtggatatgccaatgctgaggagatgttcaatgactttctcactggtgaacgtgctcagctcatggcatttgtcaagttcatcaaggctgacgccaatctgtggaaagcattgaaggacaagaattgggctgagtttgctcggcgttacaatggcccggcgtatgcacagaaccagtacgacaccaagctggctgcagcatacaaatcattcagttagtcgaaggccggaaacggcctttttctttatctatgacagagttatgctgggcgcgtcgcttaattaaaggtgatgagataacccctgtagaaataggaaggttcacatgcaatctgcgagcaaagtagtatccatgaagccagctggtaagaccaaatcagcgcgcaagaaagaagtaacccagcgcgaagacgaatggatgaagttctctaaaggtgatttcaaaatcgctccattccatggcctctctgacaaccagaatctcgcctaccaatctgcccttgaaaacaatctgaccatcacaatcggacctgctggtacgggcaaatcttattgcggtgctgccgctgctatcaaacatcttattgatcgccgtgtcagtaaaatcatcatctctcgttcgccgttgccaaccggacagactgcggggttccgccccggcgacacttatgaaaaactcgtcccgtatctgcgcccgctgatcgaaaccttcaagaaggtgctgaagaccgatactggcagcgacggcttcttcaactatctgtgggagaagcacatcatcgaaattcaggatctggagaccatcaagggtatgacctttgatgatgccttcctgattatcgaagaggctcaagagtgcgacatggagcagctgaagaaccttctcacccgatcttcagattcgacttacgttttcgttaacggcgacatcaagcaatctaacaaacgtttgcgtgacagcgcccttgacacgtatgtcaaagcattccgtgatttcaaccagaaactggaagcaggtactctggctgttcacggcgtagaaccgggtgatgcatatcctgattgggttcaacctttcagcatcatcgagttcaacaaagatgatcgtaatggtcgcggcaatttcactcgtctgatgcttgaggtcaatgacctgtacgacatttaaatacctcatcaccattccccgccgccttcaatctgcgagggcggcgtataataacaacctgcatataacacaaaccgaggatcgctatgattaacgtcataaagcgggacggatcttctgtcccttttgatattgaaaaacttcacaccgtcgttgaccgcgcttgtgatgggctggacggggtttcaatgtcagaggtgattgcagcatcaaagatccaattcaccgataatatgagaaccgaccgcatccaggatattcttatccaggcggctgcgtctctcatctctgtagaaaagccgaactatcagtatgtcgcagcgcgtctgaagtcatacgatctccgcaaaatcgcctatggccagtacaagccgccccatctgctggatatctttgtcaagaacatcaaactcggtaaatacgaccgggaattcctggatctgtacaccactgaagagtttgatgaacttcaggccaccatcaaccacaaacgcgataagaacttcacctgggcggccatgggccagctgacagagaagtacctgttgcgtgaccgttctcaaaaagacaagaaagtctattgtgaaactcctcaggtcatgtatatggcgattgctatggcgctgttctctaattgggacaaggccagccgcctggatatgatcaaaaagttctacaattatgccagcacaggcaaattcagtcttccgacccccatcatggcaggcgttcgtactcctacccgtcagttcagttcctgtgtattgatcaaaactggcgacacgctggattccatcaacgcgacagccaaatctatcgtcgactatgtgagcaagcgtgctggcatcggtttcgacgttggtgcaattcgcggtatcggcagtcctatccggggcggagagatggttcacactggtctggtgccattcatcaaatatctgaccggggcgctgaagtcttgctctcagggcggtattcgtggtggtgctgctacggcttatgttcctctgtggcactaccagtttgatgacatcgttgtgttgaagaacaaccgtggtacggaagaaaaccgcgagcgccggattgactatggtattcagatcaaccgcgtcatgtttgaacgtctggtcaacaaacaacctctgtatttgttcgatccgaaagacaacatggatatgtacgaggcatatttcagcgacgtggatcaattccgtactctgtacgacaacatgatcaaagcagcagacgccgggttatgtcgagccaagacactccaggctgaagaagtattccagatgttgctggatcagcgttccgataccgggcgcatttacatcgcattcgttgatcacatgaacatgtatagcccgttcaacctcgacacgatttacagctcgaatttatgtctggaaatcgcgttaccaactcgtgaattccaacaatacgatgacgaaagcggtcgtatcgctttgtgtactctggcgtcattcaacctgacggcgtttgatgagccgacggaaatggaagatgtggcattcgtattagtgtccgcgctggacatgctcctcgaataccaagattacccggcccgccaagcccgcctggctgttcaggaatatcgccccctgggtatcggtgttgtcaacgtcgctcacttcctggcgcggaacttcaccggatatggttcgcccgctgggttacagttgatcgatgaatggatggcacatcttcactattatctggtcaaggcatccaacaagctggcggaaatgtttggcccgtgtggtaaagaaaccatccattcaagcggtatggtaacagctgatctggcccctctgcctctagacctccttcctaatggaaaaaagcctgttggggacgcatacggtctggattgggatgggttaaaaaataggctcgccaaatttggtatccgcaatgctaccctgttggcgatagcccctactgaaagctcttcgcaggtgctgaatgctaccaatgggattgagccaccgaaaggcttggtgagcattaaggcaagcaaggacggcatctacaagcaaatcgtgccggatgtcgaaacccttgggcctatctatgatctcaagtggaacatggaatgtatcgactatctgaagacggcggcggtgttccagcgctgggttgaccaatctatcagtaccaataccttctatgatcccgagaagttcccgggaggcaagatcccccgcgccaagatgatgcaggatatcttatccttctatatgtggggtggcaagactctgtactacaacacaaacaaagactccaaggaagacgaggagttgaagcaggctgaagaacctggttgcgactcctgtatcgtttaaacctaaataagagcatatggaggtgctcttatgaattatcagaaaatatatgattcacttgtcgaaaaggccaaaatgcgttctttagaagggtattttgagtcacatcacattgttcctaaatgtatgggtggttccgacgatccttccaatctcgtgagactaacaccagaggagcattatctggctcatgcccttttggttaagattaatccagacaattataaaattctcttggctgtcaaaattatgtgctctggtgatcacaagacaaagagaagcaaaaataaattgtatgggtggctacgtcgcaagattcccgaaggaatcaaaaagatgtacgaggacagaccagatcttaggattatgcattcggaaaggatgaagaaagataatcccatgaaaagggatggtgtcgcccaaagagtggcggaaactcgtagacagaaaggaaatctggggcgtggaaacacacctttaagtgaggaagaaagagcagctatttcaaaaaggatgaagaaaaataacccatgcgcgggtatccctccgtggagaagcccaaaggcgaccgcgcaatccattggggtatggcgcgacgccgacgcatattaccaatggtggtgtacgaacaagaaagggtattgtgctatggcgaccacctttggcttcaaagactggttgtccgcacaccaaaacatggttgaaaagttcaagtctggatggataccgaaagaagatccagactggttaagttggttggtctaaacctgctaccgttatatcatcaggggtgaagcaattcaccccattatccatcaggagttctatatgttccagacattattgttagtccctgggcaaccaggcatcttccttgaacacgacagtaaagtcgaagcggagaatgttctgcgcaacgtgaaggtggctgctgcctggcacaacggcggcgaagtcacggcgatccctttgaactacacggatctcatggacaccgcgaaccgtacccacatccttctggacctcagcaaattacctgaggacaaacgccaggattttgttgctaacatcaagaatcacatcaccaccgaacagatcaaactccacgaaggtaaagaataacatgagtgagatacaaaagcaattttccgttttcgacccgacatcgaataaccagggactcccgttctttggtgatccggtatcaatccagcgttatgacgttgttgcttggccgtttgtacagaagtggtatgaaaaaggcctcagccaattttggcgcccggaagaagtagacatcaccaaagacaaggcggattttgccactctaagcgatggtgaaaagcatatctatttctccaacctgaaacggcagaccatgctggactctatccagggcgcggcccctttcgaagcattcggtgcctgggcttctaccccggaggcgcagttcgctatcctggaatggacccgccaagaggcagttcactctctgtcctatacccatatcctacgcaacacggtcaatgatcccggcatcgtgtttgaccatgtgctggacgtagctgaaattgttgattgtgcacaccaaatcagcacctgctacgatgaatctgtgcgctgggcggggatgcgtatggcgggccggatcttcacccgtgaagatatcatgaatgccaagcggtcattctggcgatccctgtttgctgccaacacgctggaaggcatccgcttctacgtttcctttgcatgctcctgggcattcgtccaattccttcaaaagatggaaggtaatgcgaagatcattcgccagatcgcccgcgacgagcaggaccacctgatcctcactcagacattcctgaatcgtcttccgttgatggatccggactttgctgtcattcgtgaagaacttcgtgctgagatgacacagatgttcatggatgtcgtgaatcaggaaaaacagtgggctgactatctgttcaaagaaggttctatcctgggactgaacgccaagatccttcatcagatggttgactggctggcgacccaccgcatgggtgctatcggccatccgtatcctggggaaccgcgcaaagataatccggtgccgtggattaacgactggctagataatactacaatgcaatacgcattgcaggaagcagaagctcctgattatctgatgggcatactgactggttcagtatctgacggtcttaaatttgcataaaggtgagaaatgattacgatctattccaaacaaggttgtgcacagtgtgttacagctgagaacatctgtcgcattcgcggtattgagcatcgtatcctcaaacttgaaaaggactacaagttggaagatctacaagctctgacgggcaaacaacgcatgtcaatgcctgttatcgttctcgctgaccagactgtgaccgacgttgctggtctcgccgcaagcgttaaacgctgatcatatcaagcccccattccgggggctttacttttgaaaaagccgaacctatacttcctgtacaacgcaaatattgaacagcaggaactatatcatgtcaaatatcttacgcaaccccggccatcattttggatacatccaactcccgttggtcatcgacactttataccctgaagacaaagaacagatttgttggtctccagcggccctcattgaacgagagatattcaaatcagaagtcgacgtgatgtatcgctttgggtcaaatggcgaactttattatttgggcaaagccatagaattgcgtacgacgagagagcaacgtttcttacgcatagacacaacggattgtggtttgttctcccaactacaagaatatgtgaaacagaatcgtccagtttcccagcaccgcccgttcttgtcaagtgtgcatattgacaactttatctctgacgttcaccttgtggcttctactcttcacgatgaagaaactggtgtaccgaatgacacagtcttaaatatggttgtgatcacattagtggagtaagccgctatgagcgatttagtcttgaatacccaattccgtcttcctgtggattctcttgtgccgtttcaaatcatgaaacagatgcttgaagaaggcatggaagttccgttaaaacataatggacaagatatcgggcgctgtatgagttgctcatttcaggatgatgcgtattgggcaatggactataatgctcaaatgccgattgaggctaacacactcatggaattgggtttcattttcaaattaaaaccaccaattcgtttatacgatatcaagcctgtggtaatacagatacctgctggcaaatcaacttacatgtacttgatatcgcattttatgttttatgacgttgcgccgtcagttggtccgttgtaaccagatggtgtcagtaatcggttcaggatcattcacgacgttaaacgtaatggtgactgccagggaatggtagtcatcagacagagatacttcgacagactgtagttctgcccttggctcataaagagcaatcgcatcttcaactttgttcttcacatctacctgaatagtcggcgtcgtgttttccccgagcatcccataaaggccagcgcccatatctgggagagtccgccattctcctgccgacgacataacaatattccggacagactgtaacacagcccatttaccagatttcatcgtaacgtctttggtaacaggatgcatcccaaattttaggtccacatctttataatctttcatgttgaggctccctcagcagcacggagaggcattatccgcctctcctggtgtaatcgtatggggttattggctggaaccaaaattaccaccattgtcttccagttccggtttgatatcgatagtacccggccctgtcggtgacgctggggttgcaccactaagagaactggcccggcccgcgccttccgcatatttgatgttgccatcaatagtttgggctaccgtcaatttatcagcgatgatctcggacacgaggatcttaggaaccttcaacgtacccgacacttctaacatctgacaaacgatacggaaaatattctgcgcctggatttcggcaagctgagaatatttcatcaaagatgtcccggcaaccacgtgtgaatgattgctggaatgaagatgataaacttcgcctgtcttgcgctgaacttccgtcccaccaacagtcaggttatggtcacgcccgacgtaataccttttgtcgaacatcgcaatatcatagtggtcttttactgatttattgaccacgtcaccattcggtaacatttgtttataggaacccgattggtgcatccagtggagacgctcaccaccaggcgtatcgtctacttccataatgtggccagaacgggaagccataacattgttgtatggatacaccgaaccgccagcagatggaactatggtttcacctgttttatcaatatcctgtactcgaccagatggtggcggagtctcttgtacctttgggatgcgatcaggaataggttcagaccatttgctgttttgctgtgctggagcagccgccttcgtgttcgctggaccgggccaacgataacccaaaaccgaagaacgactgaaacggctgaccttcacgctgtcagattggttgcccccaaggcaccatacataattcgcatcaaacttctggacaaatgcgacatgaccaaaagtcgggttgttcccccggcggaatacgaccactgctccatatcttggttcagacaacggagaaccccattgaagatatgaacgggccaaagcggatcgcgtagatgtgaatccagcctggaggagaacccaaccaacgaatgcagcacaccaactcacttcgtcttcagatgctccaagagaagtggttttgtgatattctacaatccttgggttgttgttgaatttaccagcatattccttcacacctaattcgcctcgagcgacagtcatccatttttcaggatcatacccatctttgggcggctctgggtcaggttgaggttcgtcttctatttttacaggaacatctgtaacagcattatatttttgacgttcaatagactgcacaacctggccgagagccaacgggttggtgtcagaaccattaacctggttggctgctggccacacccacgctattctcaaattctggtatgcttcgtcaagggcgaaccccatgacttcactgttgacagtaatgccagtcggagaccagcctaaacctgccgaggacgcatttgttgcaggcatcatgagcacagcccatggcaacagctcagtaggcaggagagtagtgtcttgggtgtgtacgccgtatacacggacggcaacgcgcccgttttcttcgggatcattcacgtcttcaacgcgcccataaaaccaacgcatattttctaacatagtgatgtccaaatgtgtagaggatgttgaagatatttatgctctgtcgaatataatattataggatgcgtcagcatccgttgtatttgatttatttgtttcaactcgcgttgctcgtgaaagaccgtcttacgcagacagcgcccttccaatgccagggaggcataaggcgaggaaacaaccatacagcacagaatgtctgtagaaaaacgatttttattccatcctaaacattcaatagcttagaagccaggagtttgttcaggaacaatgacattataagaaattgcgttcaagaaacaacaaatagacctgtaaaacaaataagcaataaaaaccccgctcatgcggggttttggttctttttagcaagacgagctttcaatgtctctgtaagcatatcaagatgccagggcattaattcgcttatttcaaatatgctatagccttgtgactttaattcgtcacacatcacgaagtaggataataaatcaatttcaaaaattaaatgaaaatctcttcaagactattaaattcgatcttatgctctttaccgcaaccaggacacttaatcttggtttcaaaatgaatgcgcggtattttggaaaagaaatcgtctttaattttctggataatatccgtttccaggttatcgccaacccattgtacaaactcatcacgagttttcttacgggcaactgctacctgaggatcaatacccggttcattaggatcatcaaaccgccaaacctgaccgtcatcgtcatacaaacaatcgatgaatgtagcaatgctctcttcgatagaaaccactttctgaagcactccagcatcagagaaggatggttgacgcatcttgatgtgatagccacccggcaggtcgaagcattctgtaaacccctcgacgccccgcgccgccaccttgtccagggggataggcacaacgagttcttgaccgcatgcttctaaattgtccccaggataatcaggatcaaccgaaggaactttgatctggttgttgcatttgtaccggattttcattacttcaccgattgatatacaacgcatccgaaggaaaacttcttctacaacaccgattgggagtttggaaaatggaaccccagcgtctacacaagacgaaaataatgattccatcgttgcgatacgttcatcatcaggagtgtttgggtcagccacctgaagtaaagaagtttgttgccccgcagtaaacgcgcgatacttgataacagtaggccaaaattggcttttgagcgttctttctgtacgaggcaatgatggtaaattcataatgtatctccacggtatattgtacagatatttatagtgaggaacgaaaatgcatggtttctgttttagccagatcggagagcaattgacaatacttcatcctgatgctggtactgatttctatttattcctgtcggattatgcgagacatttgggtgtagacaccatcgcgatgtctaaagatgacatgaaatttggtaaactgggaacaaaagatttattgagatatggatttaatgtcattgtcgtagatcctgtctatagtcctattcaggatgaagacgttatacccgtgggtgtacacaggaatattgaaacattacacaaatattatcccgattgcattgtgatcggggagatcattccgtattttcataaaagaagacgccttcaaacgattaaaagttattttcaagaaggccaagcgtccgttattatggatgtcctcacaagtggttgggttgttaaaagtacgactggtaatagccaacaaatcaattcccgtgtatatgaatatgtgaaagaacgagactacgaactggagaatagtaatgcaaaacgaaaaacgcgccgatcttgagcagttgaaaacagttatcatcaatcgcctaaaggccgtcgtcaccaacgataaaggtgaagtcgcgccggggtttgaaggtattttcgatgaattccaaaccgacgacatgggtaatccggtcatccaaaccgtcgccgggatgatcatgatcgataaagaaatcctggaaagcggttctgttcgttattcaccgaacatgggtgttgaagccgaatccctctgttccgaagtgatggacattaacgaagcgatcagtgaaatcgggtacaaactgcttatctgtaccggccattatgtggatcctcaggggcagatcgcttatggtgacgaagcacgtaaagtgaaacgccacgttgaaactagcgttttgctgaacaccatccgtgagatgcagaaagagcaggaaagcatcaagccgcgcctgatcctgccggatagcaaaatcgtcacccgataaatcggtctaaatacccataacaccaatgaaactatgttatgggtatttttatgaaatattgcggaattgactactcttatggttgcccagcgatttgtgtctgggacgacaaagatcctttggaatttaattcccttcgcttctatgcatattacacggtagaaaaatattgtcgccctattcgaccgaacatcagcattatgaagcaacctgcatattcctcccctgaagaaagattctataacatttccaaatgggcagaagctgttcttcttacagagaaacctgatttcataaccctcgaaggttatgcgatgggcaactctaagaactccaataatatatgccaaaccgctgagaacacttctcttttgaagcaagcaatgcgccgtaataatatggaattcgaaatcatcactccttcttataccaaaaagaatttcacaggtaagggcactgctgacaaacttgctatgatagcccacttcgagaagctgttcaacgttaacatgcgcggtataatggatatgttggaagttaaagatccgaagccaatcgatgatcttgtcgatgggtttgccaatatggtaggcggttctgctttcaaagagaatcatcccgaatttaattctgaggtgcacaatggttgattattggttattggcgaatattatcacgttcgcattattgatggcgacggcgttcgtttggttaaaggcgatgctgacattcttgtcttcgttggcgatgcaaatatcgtattattctgtgacaccgcatgaagaccagaatattcgggctgctcaacagagcgaatatctgtccaaatatgttcatttacgcgaacgctcggtcacaatcgttttgttttccacaatgctgtttgcggttatcttatttgtacgatatgtaatggaggccatccatgccgttctatgattatgcatgcaaaggatgtggtcattctttcagccagcgcaagacctgtgctgagcgccatactcctgaacttgatccctgcagcgaatgtggtggtcagatttctatggtaattggcgctccaaaaatcgtttccggtgtccgtggtcctcaatctgctccggacgggttcaaagatgttcttcggcagatcaagaagacatcgggtaaggggaacacaatcgatgtctgacggacaaatcgctcaggtgttgacgcctgattcattttcagagatggtattgatgcgcgcacagaccaccagggaaagcctcctggaaacaatggccagcgtgtgtgaagagtatgatatcgaggaatctaagattcgcaagatgattacaccgcctctgttatcccgtttaacagctgagtgcgctgatgctcgtttgttgaaaggtgaactgaaatccaagaaaattttataggttgttaaaatgactaaagaacaagtctacaaattgattaaggcccaaggcttcttgcctggtgttacccgctggcgtgtgggtagtcttaacgagcacgaagaccaaactgaccggatcaaattcacgactccggaaggcggtgtgtatgtcgtggaataccacactcacaccgatgccaaacgcactttgtctgacgtgttcgatattattgagattaacccgaaagaacaattacttcgcggttaaatcaatcaaatatgcgggggtataattactcccgctgtgaaagaaatattgtgtacagaatagccccctggggcgatactatcgaggaaagaaagaatgtctagtttatttgatcgtctgaagcaatcccgtggtcagcaatctgatgctctgcaaaaacgtctggaacaacagggccagcgttcggctgcagcaaaggatccgcgtatctggaaatggacctggaacaaggaaggtatttccgaaaacatcatccgttttctccctatcccgctggtagatctgaaagcacaggaagaaggcaagatcgatgctgagcagattcttactccggttgcgatgatcatgcgtcattccttccaaggtaagggcggctggtacatcgaaaactctcctcagaccttcggccacgaagatccggtgcgtgatcatgatcgtccgctgtgggcgcaacaaaaagagaccaacgacgaaaaactgaaagaagttctcaaaggtcgtctcccgaacaccaagtattatgccaacattctggtgatcaaggatgttaattccccagaaaacaacggcaaagtattcctgctggaattcggcccggcgattaagaaatttttagacgcggcccagaacccgaaattcgctactgatccgaagttcgatccgtttgatatgtggggcggcgccaacctgattcttaacctggttggtgagaaacgtaaattcggcaattgggaaggtctggtgccggtcatggataacgtgaaatgggatgcggtttcttccctgggcggcgaaggtgaagaaggcgataagtacaaagaagacatctgggaaaaagaacacagcctgtttgagttcttcaacccggccaatttcaaatcgtatgaagaactggaaaagcgtctgcgtaaagccctggctatcccggacagccagccactggtagaaagtggtgcagcaactgtcgctacggctccggtacatcaggaaccgcaacgcccgacggcccaggatagcctgaaccagcagcagtctcagccgtcgcaagcacagcagagcgttcagactccttcttctactggcgctgatgctaagcatacgtcgtctctggacgagttcgagcaattcctgaaacgtgaataacaacacaaagccccttcgggggcttttatcgagactctatatcatgaaatctttcttttccaaaatttgtcctaccctgttgtctatcctgatcgttgtgtccctggtttccggttatgttgatatcgggatcccgccgttcgatggccttggcgtggcgctgatctacatcaacatcgtattgctgatcctgggaattgtattcctgttaatcacgttggtggaaggcggtaaaagcgttctgaaccaaaaggaaatgttgggggagaaggcatcatatgcctggcgtaatacaagagtggcgatcatattcgttgttgcggcactgtctggccatgttctcactgctgtgttgtatgtcaccgcaattgttatctatcggggatttgaatataccgcccgcctagaatacaaaaagctgtcagacgcagttgacaatcccaccaaataagaaaagccccttttggggctttttaattgctggcgactctcttcaacatccccaatagactactcttttcagatgccgtcaggttgtcattgccgagaatatccctctggatgccgatagagatgcgctcgaagtcggccaggcttattcccgccatgttgtttaccaattgatcgagttgcttgtaggcaagaagggcttcacccgtgaagttgccttgctcgagcttcttataaagctgcccggcctttgacgcagcggtttcccaatctccggaagcaagagcatcagcaatacccagaggaagaaagtcgctggcgaggctgcgtgtttcatattctgtctccgataggactttgttgtatgagaatgaaatattgtattggttaaattgatctgtggcgcctttgtcaagttcaatagacgagaagtttacaggatgcgcttcaacaatataaacccggtggacaacctgatcttctgtgtccaattgttcaatgcaaatatcggttacaaaatcttcgtaataacccatctttgtagtgagaggatcgaagattaaattcttccatttgtccataacagacttttcataatagtcattggccaaaaggaatgagagttccaaatcaacgtttgatttgttattcggcattttgatatggttgccgttattattcataggtgtcgtgtcgataccgacaccaggtaatgaagcgaccatacacatcatttggagagaacgagaagtttggtttgtccctccaaagaatgcgtttacgatacgcgctgtggaacggaacaagtcaccaaatgatgttgtatctgaggtgtacgcttgaccatcattggctaatgtagcattagagtcaaagatgcctgcaggcaaggggatagtcacctggaatctgttcttccttgacagaccgcgctgcaacatctgtgtaataaaattgcgatagtcttccacgatgaggactccacttaaataatagatctgaaggtatttataggagttgacaaatggcaaagaatgcgatgggtgaagaagatccgctgctgcttccagccgaaatggatgctcccgaattggtgaagcgctacatccgaaagtaccgccagcacttcggggccgaagccaagcgtaatattcgccgctcccacgtgtggttcatggaacgtgtgtctaaggatgccaacctgaccccacagcatatgatgaaagcatttgctgagaacaagcgcccggtacagggtgtccgctatatgatcggacgcatgttctatttcaaatatgatgccctgacaaaagaagagttgccatactgggacatgtatcccttggtatttttcttcaattttgccaagggggatgggattaattttggtgagcgtggcgtgacttatctgtgggggcttaaccttcattatcttccaccaaaactccggcttttggtatttgaagacctgattaaattgaggaatgaaagggcataccgttctaaaacccgtttgcgattaacgtgggatgcattgaaacggttcgccaaccatcctctgtatgaacattgtgtcaaactttacagggctgatcggttcagaacacagctttatgaaatcgaaccacaatattgggaagttgtcctctttatgcgtactgcacgcttccagaaacaaagccaggccagcgtctggaaggatgctcgcatgcgccataaacccaaaaagtgattagttctataacccgtttgcagcgataattcgcgaacgggttcccttcaacaatgaggctttacaatgtctactatttatcgtattctcggtattgaatttacaccggctcgtcttgacgcaacacatccgttatctaaaggaaagactggttttgaaatcggccgggattctttctacaaaaacggtaaagtgcccccaacgtttgcttccatgattcgtgctatgggaatcagcgaagattcagaagccgaatatgatatgaaagacctgctacgcatcggcgatagtgaaacaatcgacttcgtgcaggattttatcacaggatggtcgcactccagtgatttgaagaataaggctaacaaaacgttgggctgtttttcatatgcggttgaatatctctgttcaagaagccaaacaattgaattcttcagggacgatctgttatcagctcttggtgaatccgatttgcggttagtggattctgaaaaccgtgattctaacctgcgtgacgcgattgaatccaatgaagttcatatcgtcaaggaacgcaatatctttttcggtggcacccaggggttcaagatccaccctgacctggtttacactgacgaagtttgccgtactctcacgaagttcttcggcaaaattaatgattcgttatatgtcgctatcgctttgattatgcaagaagagcatttcgaatccaaagttcgccaaattcgtgaacacgtgatcgcaggaagtgatttcagatcgaccgaaccaagcgaaatgcccaatttctttgataaaaaataatctgccgcgcgcctggagatgtctatgagaaggtatttgaggcttaatacagttctagaatcattgatagaattttatatcttacaacatctccgttcaggaaacgagcacattgacgacttcctcttgtatgatcaccagataacgatccattcagttgaagtcgttgatgacgatctgctcctggccaacatagagcacagtctgtatgataaccaggcgggtaaatattgtgctccggcattttctcaggtagagataacaccatgctggcctgccgaaaaagttttcaatatagacgatgtggtttatgatgaagcgaactctttcagatagagggttgtgaagaaagtttgttatctgaacattctttttatagaaagtggtttacaatcttcaaaactacagtatagttgaaaacaagcgaaacggctttgtcagccgaccgatttacaacatataggatctacactatgtcttacattctccatattgagtccggcctgaaatttgatattgaaggtaaaactgcgtctgacgtccagtccgaaatcaaagacgctggtctgctgatcggtaacgtaaccatccgccgtatgctcgacggcgtcctgcaaagtgccaacgggtttgagctgatcgattccctgtctcaagaagagcaggaagaaaccctggaggctctcgaccgtgcgaaggccgaagaagtccagccgactgacgttgctggcgatgccgctccggttattgacgccaaagaaaccgttgaccagccggaagcggaacaaactgcaaattccgaagaatctacggaaactgctgaacaggctggcccgcaggaagtagaagctgtggcaaacgcagatgaagttcgtcgccgtatcctgggcactaacgtggcagaagcgctggccgaaggtggcaatgccgctgaagacgcttccctggccgcgaaatctaagctgaccaacctgaccccggcagttgcgccggaagatcgaaaacgtcgccataacaaacgcgaagaaatggttgaagccgcacgttcttccaatttcggcgcgatcctggcagcagtagaagcaggcgtcattccgggtgtttacctgagctatgtcaacccggatatgcgctggttccagttcccggtcaccgacctggctgataaagaaaacccgcatgcgcggactaacacctacgtcgatctggcgccgatcacttccggcggctggggtttcagtctgtacgtgaaaggtaaatctttcaccaaacgccagaaaatcaaagagaccgatgcggaatctctggttaaagcgatcaatgaatggttgccgggcgctctggaagaagccaaaaacgcaggctgattttaaatcagattccgttcaatagacgaaggggctgctataatagcagcctcttttgtttattggggctttgtatgtcttatacgatcaaaggtctgttgaaaagacctgtccatttgttccataaaccacctgccgtcgtcggggaatatccggcaagaggagagctttattatgtcaaaggctccaacggtagtggcaagtctaccgttccgtcctggatggcggagaatgatcctcaggcatatgtcgtgacccacaatggtaaggtgatgctgaccgtttgcccatcatttaatatcatctgtgtcggcaaatatgacaaatctaaatctaaaggggttgactctctaaaagacacagagcagatgctattcgctgtctcaatcacggagcagccagaatacatcgggtatgatgtgatctttgaaggtattatccctgccaccttgctcaatacgtggattgaacgtctaaaccgcccgacccgccgccttgtggttctgttcttggatacccccaaggaagtatgcctggcgcgtgtgagttctcgcaatgggggtgaagacttcaaacacgaactcgtcctggagaaatggaagcgggttaactctcaccgagagcggcataaagagttgttccctaacattcctgcgggtatgatgaagtctaatggtctgaccgttgatcaggccgtatctgcgtttctcaatcgtgattttgggagtattgattgatggaaatttttgctttaaacaacaacgacatgctgaagaaagctgtcctggctatccgtgaacatgggattgagtctgatcccggtaatgcggagattaatactgatggcacccggtttcttgatggcgtgaccataaccgtctcggacatccgtgaccgctggctttctgttgaaggtcgcaattcttctgcgctggctgctattggcgagaccttctgggttctgtcaggtcgcaatgacatccgtttcctttcccgagtactcccccgcgcggccaacttctctgacgatggtgtaacctggcgcggggcgtatggcccacgcctgtacaatcacgggcagctggatagcgttatcagccgtctgcgcaagaatccaaatacccgccaggcttatctgacaatctacgacccggcgctggactctgatgaaggtttggctgctcataatgaaacaggcgaagccaagaccaaggacatgatctgtaatttggctcttttgttctctattacaaacggctgtctgaacatgactgtcatcaaccgtagccaggatgttctttgggggatgtcttcgattaacttcattgaattctctattcttcaagaagtgatcgctaatgttttgggcgtgaacgtcggccagtacaagttgttctccaacaatcttcattactacaacaatgaagtaagtcgtaaacagcttggtggtatcacctggaaaacacaaacttctactggaggcctggtgtgttctttgctgtctttcaatcgtgacaaagtaaagaaccagaacgacatccgcaacctgttcctgggcgtcctacaccattgcgatatcggaagcgactttggtaaagtccgggagcatctttctcagtttgatgctgacaaagggcttatgctggatatggcttattgtctatggtgtcgcctaaacgattcgaagatcgataaacgcagcattgctgatgacggtttacggacagcattaatgcattcttcggttgatcggaaatatatttggggacaaggcgaatgatgtatcctaatcttgaatttttcacggggcgcaagcgctccggtaaggacttctgcctggagtccattattgaagcagaccggggtatccgtgtcgttcatcgtctttctttctctgatgagttgcgccgggtggccaattacatttacccttggctcccggttgacgtagatgattccatcaaggatctgccgttctcacatccggataacgtacacaacctgtcgccaaggcagatctggctccatctgggcaacgataagggtggtttgcgctatgtacaacccgatctgttcctggcgttctttaaacgcttccaattgcctctcgtggaggctaatcctggtgtgcactatatcgtgagcgacctgcgtactccgcaggaatataattgggcgctgagtactaaatgtcccatcacgcgcatttcaaagcccaatcgttctggtatagtagaggacgacgttgaggcctatatcgaccaaatggttgttgattatgattatgtcaacaactttgaaggccgtaacaattttgttgaattctacaggaacagaaaatgataacagcagatcatattaaaagactgctccaactccaagaggccactaatgtggcctactttggggaagagtgggaaaagtattggactcacgttgccgtaacgaactcaatttatcgtgaatgggcagaattccttgatgaaaccaccaaggattggaagatttatgggaatggtatccatttcaatagaacggatgccgtctatgaattggttgatgtggtccattttatgctgtcttccatattgtccgggtatggttctgcgttcccgatcgaaatgcaatttgatcttttcttcaaagaaggtcaggtaatagacaaatctgctaatctggtacatgtcaccgaacggttcacgtcgtttatgggacaacccgatatcatccggtttgtacggttcttggtatgcgcctgtggttatctgggactggacgccgagacatacatgctggcgcacaaacgcaaaaatgatcgtaatcggctgcgcgctgcgggcggcgctgactatgacaagtccacagaaatccctctgaccctggagttctaatgtttacgattaacatctccatctcggccgagaatcttcagacctcggtcagtaatttcattgagcacatgaaaccccttgggcatgtggtgctcaattgtaagttagacgtcgaaggcggggttgcggagatgttatttacaacaccttccccaactgacgcattcgtcttgattgagcgctgggcatcggaggacattcctgttccagcgccgttgcaggatatctatttcagtgagacgatttattcactccatactatgcccaaagatgttagccaggctgatattgttcgtctgattaatcataacatcaactttgggtgtatcgttcggcgtgataactatcgtttacgcaatcatttcctgtatgataaccagaaccaattggatgaagattcattattatccatcaaaacgatgcaggaagcgattaatattttgtctaagaaggttctgggtgcagaattattaaccacaattaacaaacaagaggaagtaaaatggccagttcattaatggatcgcatgctgaaagttgctaagaaacatgacgatcaggcttcggtattgtctcagtcagacgcgctggacccgaaaattatctgctcgactggtattccccttattgatatcgcctggtccgggcgtgttgatggcggtctgatctctggcatcaaaatgatggtcggtgattctcgtacattcaaaacgatgttcggcctggttgacgtcaaagcgtacatggataaattccccgacgcgatctgtgtattcgccgattctgaaaagggcgccaacgccgattattggacatccatgggcattgacatggatcgtgttctgtacgtcccgatcgataacgttgaacagaccaagatccgtctgttgcagattcttcaggaagtgaagaaaggcgataaagtaatcgtgttcatcgactctatcagccagttaccttccaccaaagaggtagaagacgccatcgctggcaaagatacccaggacatgacccgcgcccgcgccctgaacagcttctggcgcgtcattacacccgagatcaacagcaaagagctggtgttggtctggatcaactcgtattatgatgaaattggcaaccaatatgctgagcctaacatcaaaggcggtaagcagggattcctatcatctaacctgatttggtttatcacccgttcccaggtaaaagaagacaaagacctgctggggtggaacttcaacatcggcatcatgaaaggtcgccatgttaaagagaaagccaaactccctgtcacggttctgtatgatggtggtattgatcgttggagcggcatgctggaaatttctcgggcgcttggctatgtcgatatgccgacttctggctggtatgtcaggacagccaaaggtggatttgatccagaaaaagagaagaaatatcagaagcgtcaaatggatgatgacttttggtatccgcttctggaaaacccggacttcgccgatgacgttaaaaagatgttcggcgtttccaacggtacggtaatgcctgcgaacatgctggagcagatggaccatgttatcaacaccagtgaataacaatggagggggagtcacctcccccgttaattacgaactcatcgaccccggtgaaggccaaatatccatcgtccacattttggagggccaattccgtggtgtcaaattccgtattgggaaagtatcctgggaatggtctgatgacgcaccccggcttatttttaccacggatattttgaagaaaccttggcgtcttttctttaatgatttgaaaaataacgacttgttcactgaagtgtcaggccgtatcttattagacttaatgcagaagaacgctcaggaatacaacaaaattttggtggggtagttgccaatgttactcgaatctgtcgtgctttcccaattgatttacaatgaagaataccaaagaaaaatattgccttacctgaaagccgattatttcgaaaatgaaggtgagaagattatattcggattaattgacgattattcgtcagaatataatgctcgcccttcggttgatgctctgtctattatgctggagaagactccgctcaacgagcatgtgtttgaacaatcaatcgccgctctttctaatatcaatgacaatacattcaatcaggaatggttggtaaaagaaactgagcagtgggcgcgcaataaggctgtacacaacgcgataaaaacagctgttaacatctatggtgataacaagcggcaggaggagatgaataatatccccaccatcctgcaagaagcgttgtctatcagttttgattcatatcttggtcatatctattgggaaatggctgcagagcaatatgaccatatgaattcagctgaggccaaaattccattcgctgttgagatattcaacaaggctacgcgcggcggtgtaggcaaaaagaccctgaacattgttacgggtgccatcaacgcaggtaagaccacaaccctgatagacctggcggcgggttattcagagcaggggttgaatgttttcgtctttaccctggaagttgctgagaacatttggcgtcaccgtcttgacgcccgtattatgcgacgtgattttgaagtcgttgagaagatgacccgtgaagagtacatcgggacaatccaaaaattaaggacaagggacaacggctctctgaaaggcgatatcgtcatcaaggaatacccatctggggcaggacatactggattgtatcgtcgagatattctggaatatatctcatcaacaggcatctctcctgacgttatcattatcgactatctgggtgaatcggcgtcttcgcgtcttccggctcatcttatgaacaacaccaacgtgtactatacatctgttgctcgcgaattccgtgctcttgggttcgaatttgattgcccggtgtggactggtatgcagttcaatcgtgagaagcaatcagccacagacggggatatcagtgacctggcagatgctatcggtatcccgaaggtcgccgacttcatcatggcattctatgcgccggacgagttggctgcagtcaagaaggcccgcgccagtatcctcaaaaaccgttatgccaacaaacagaaattgaaatcgttcttgtttggtatggatcaggataagcagattttgtttgatcttgattggaatgaggtcaagcgagatctcaccgaagaagaagccaaatatgttgagaatgtccatatcaaacatgatatgaacaaaacagggaacgttgtgaccgacgcgaagaaagcagaaacggtcaataactggaactttggttgatttcaataaacggatcgtgaggtataatcttcatgatctgaatataaacccaggagcacatcatgttgcacaataatttcatggcggatctgctacgcgccgttgagcaggtgtgccacaccaagaaggatacgatcaatctagacttcgctcagactatcgaattctttaaagcacgccatacttggaaagaccacaatgtgaaagtaatggcgcaagaaggggaattggttgaactcgatttgccatcattccccttaccggtacggaccgaaactcaggaacaatacgaaattgaaggcgttcgcattattcctaagtttggttatcatagtatcgtttacttcttcctgagccggattggggcaaatatcatcccgaccggaatgcgtatctaatagagggcttaacatgtctgtagaacaaattggtttttatgaaatcccgaacgacccggcgctgcgcaagaaactgtttgacaccatcgaaaactgccgcgccgcccaagtccgtatcaaatcagaacagacgtacatcactgatgcactgtctgaaatcagtaaggcgacaggcatcaaagcagctgatctgcgtaaagtcgtgtcagaccgcgccgctggtacttacaccaagacaatcgaaaccagcgccaaataccaggatctctacgaatccctgttcccgaacgccgcgccggatcgtgatccgaatacttccggcgaatgacagaccccaaaggcccaacgaacgttgggctttcttactttcaaaacctttacttcaataaacatccgcgctatatttcattttattgaattgttgtttctaaatcatgaggtgaaagatggacgccaaaacctaccagatcccgctggacaatgtcgtaattgtccaggaacgcctgcaaaaattagagcgcacggcaaatcgactgggtctggtattcccgacggtggccatcagtgaaccatacagaacccaacacaaagattctacgtctggcgaaattttctatcgttggtggcgggacatttctcttgaaggtgaaggcattgaccgcccggtttcatacggcggctggtctatcatcggccagttcaatcatcaatacccaaaggtcattctcaacaaactgaccgacgacatcgtcccgcatttcattcaacggttcgaggcagaaaacgtctcgtggtgtgagcattgcaataaatcagttcgccgcaataacacatatgtggttcgtaatgaaaccagcggagcgcaaatgctcgtcggtagcagctgcatgcatcattacgtgcctcaccagaagtccctggatgccgtaatgggttattacctgtccattcacgagctgtttaataaccaggacgaggatggaatctacgggagccatatcccgactaccgccgatacccggagctatctgcgtctggtgttccagatcttactgaccggagtcagcatcaagtctaatttgtattctgttgtcatgggttgctttgtagcaggtgaagccccgaaggacaaatcatctgaagcatgggagatttatcagaaggcaaaggggttctactttgatgctctaagtgagatggatcatatgatggaattcattgcatcgctgcctcagaccaatgacttcaatgttcgcctgacccgtatgtgtgaagctgggtatcatctgatcaaggattctaccactgttcgctggggtgccgtcaaatattatgaatacctccaccgcgaatgttcccgtaccaataaggcagaaacacgttgggtgggtgaagtcggggagatgattgagaagaccgtcacctacgttgaccgcaagttcctctacagcggggattggggtgattcctatctgtatatcttcaaaaccgaagaaggtagtacgattacatggaagacttcctatattgatgcggacctggaaggacagatggttatccggggccgggtgaaagaactgactgagtatgaagatgtcaaacagactcagattaccagagcaaagttgaggacgttatgacattgttagaaatgaatgctgcggtgttaaccaaattcattgcaggtgaactcaagatcggactcgccatatttggtatcactaccgttgccttggccatatgggttctgatctatctgattaagaggaaaggttgatggaatgttcatgtggagggcaggggacgagttcttacatccgttaccccactgtgaaggaagccgaagctgctggattccgcgtagaaaaggctccctgtgtaatcgccttgaaagactgtccggtctgtaagaggcactctcaggacgtctggtatgagccaggcgctcaaccaaagacagtcaatttgctgtccatgatggggaaataaaatgaaagacgttactgatgaccaattgaaggagatgtggcggcaaactcaaattatcgcccacaagaaaatgaaaactatccgagcgctcgaaatgaactcggggaacttaccaagaactctactaatttagaggtcgaattaatcaagcgcggttatgttgtcaagcgccgtttttgggaatattgatatgacaactctcgtagaacggaagaactgtatcatcatacacaataccaggagagacacaaatgactttctttgatgtttttctcacgaatatattattcggattcggggttctggtgatttgcattacggtacgtttgttgaagctcaagaaacgccgctgaaagaacgtcgacaacattgtcagccaggcaatatcccgcacccgccaataatttattgaagtctttggggttataattggattacaaataaccccggagactcaagatgattcctctgttagaagcaattcacactcttcgtgagaccaaaggcaccaatgccaagaaagaagtcctgacccagattttgaaagaaaatcctgacatgatcgattttcttcagtatgtgtatgacccacttctttcttattatcgtacaaagtttttaccgaatgcgttccctcgtatgctgtcgcgcggcgtcgtcggtagctgggatcaggtgtacgatgttcttgaccagatgagcgaacgtaccctcagcgggcagaaagccgatcatgaattatcgaaagcggcgaccaatattcacccggattaccacgaactcatccagatgatcctggacagggacattaaagccggtattgctgaaaagggcatcaatgcggcattcaacgcagcgggcgggaccgggcggctgatcaacatactcccctatcatcgttatgacaacatgacgattgacctgctgaagaagatggacttccggcgcggggtttacagtcagctgaaatcagatggcatgtttgccaacatcatctgccgatacggaaaagaacccgaaattcgttcccgctctggttctcttattgctggcggctcagtggacaatctatccctggtgtttaaggatatcatctatgatgctggagttggcgagagcgtgttccacggggaactcttggtagtagacctcaaacaaaatgccatcctgcctcgtgctgtcggcaacggtaaactcaacagcgtgatccagacgggggaacctttaccggaacaattccaggttatctaccgggtatgggatatcgttccgtatgaaaaatggttcaatgccgagcgtgttgatatcccatatgaagcccgttacaacatcatctcccaaatgtttgacgatgatggcctggtgcaagtccaggaaacccgtgttgttcattcgtttacagaagcggtcgagcatttcaaagacgcgctatcccgtaaagaagaaggcacgatctgtaaggcagcagatatgccttgggaagatggtacgagcagccaaggtctcaaactcaaaatggaaattgagtgtgatctggagattatcggatttaatcctgctgacgccaaaggcaagcattccaagacgtttgggtcgctactttgtaagacctccgatagtttactcatcgttggcgtctcggggatctcagatgatctcaggaagtatatgtgggaacaccaagacgagttcctgggtaagatcgccgccgtcctctccaatggcgtacaggacaagactgatgatgcgttgaaatcactcttcctgccacgcctggttgaagttcgtattgacaagaaagttgctaatacgctcgatgaagtctatgagattcaaaaagcgtatgttgaaaacattctggttctattagaggccgcataaaatggatacgctattcaccctgatgtgtacaatgactttcgcgctgtccctggttatcagctcgttgtgtgccctgctggtgtggatagcgtttcctgacgttgccaaatataaaatcttcatgtttttagccattattgtcatgagttttattttaacaattcactatgccaaacaggattataatcctgacaaacgttattcttcattggcggagagatatcatggcttcgaatttaaagacattaccagaaaatgattctgaatatttgcgtcgagttgttttggaactgggcgtgaactatagcggaatggccagattattagattgttcgaacgcagtcggattctggaagaaaggctatcgtcggatacccaaagcattccgccgggcgatcttgatgctgaaatttatcaatcaaaaaggactcatgtctgagttcttgagatatgtgggtgaacaggagaaacaaaatggtaactgaatgggaaaagatggaatatgaacgggcgtttaacgtttattgtatctttatggccatcaaactccatttcacgaccaaggattatgattacggtctctatggcccgatgagcaattacaaattcgaaacattctttgccaaagaaggtatgcggaaacagtttgctagattggcccggcggtttgagacttctcaaggcgaagttgttgagaattatatcattgcaaatttcataaagtcacccaagacctgggtaacgactttgttgactcggcaggcgcaagagaattataacgaataccggaagctgtatgacaacttcacgtaccacttccttgacttttttgaaaagaatatgattccagaaattgccgggcgcggtctcacgttcttggattatcttaaaggtgacgggcaaaatcatccggcactattgaccgacatcatcatgaaaaaatatccgatttggtttctggtcggactgaacaaaataaccgggttcatcgcattttacgataaattgttgaaagaagacatttattggaattcagaagcgttcttgttgaagaagacggatgcggtagtacccaatgagaacacggattacgcaagaaataaattccgtgagatgatcctttcccacggaatttgatgttaccaatcccagagcagacgagtcttgtcagtctggttggaaggttccagattggtgctgttgaagttgttcgtcgtgctgactttcttagagttgtcaacattctgttggatcggagcgattacagaagcgggcggttggctgtacacagactggatttgtccgatgttatccgccgcccgtccctgtgtcggtttcgccgccccaaggcttccaccaccgatagacccatatgcttctttcaactgagaggtcttgtccgtgacgttctcagcatctgacgttactcccgaaggaataggcgtcagcgtctgagcatcctggttagggagtaccggagccgtcgtctgatcctgtttgacttcaggctctgcaggctgttgtttctgctggtcagattgtggtacaggactattggtcggctcttccgtcccgatcatcatagcctgacgcgcttcatccattttcttcctagcagcttcgccgcccagagcatcagggataatgcttacaaatttgtcaacgatatcgaacatggcattggttattgcgttcaacatgttgaagaatggctttttcacattctcagcaaaccctttcttgatgctgtccaaagtcttgctcgcagcagcaatcccgtcatcaatgaatgaactgatcccgccagtgacccaatcaaccaacttgatgagttcactctggaggttatcagccaacttaccagggatatcagtgagagaggtgttcttggtgatcccggcgaacagatcgttggatatccagttgacgatggagttaagccactcagcgggcttctcagagatccagagagtgaactggcggaacttcttgcccatgtcagtatcaaacccaaagatcttggatacccaatcgaacaaatccccaaagctgccgaccaattcggtaatacccgcccggacccggtctacaatggttacggacgctttccctaaaatctctttggcgttgatgaatcctttaccgaattcaaatacagaagagattaatgccagcgggccgatctttaagaatttcaaaactttaccaaatggacccaggagcttaacaatcccctccccaatcttggagaacataccaatgaatgcgcccacagcccaaccgatcgccttgaacggttttaggaggaaccctttgagggcgttgaggcctaacatagcggctatggcagcacctatccctgatgagttctcgtctttctggtcatcatctttagggatgatggaagtcgcccgtggattgttcttaccttctttcccttcctcgccccggcgcatttcttccttttcacgccatttctcgttgctgtcaaaaatacggacaagagcattaacgatatgaccaccagtcttgcctattttcttctcaatggaagataaccggaccagttgttctgaagagttcttgtcgataccttctgtattccatctgacttcatccagagtgtcgccaatacgattcaaatctgaactgataccgacaagagttccttcctgattgtccaaccgcttgaggctgtcatcattggctgctttcaactgatctgatatcaggttcaaatattcagtattggtatcatcagcgggctggcggataaggtccccaagacggtcaaccttctcgccgattttcatcaactcttcgttaccatcaacagcaacatcaacggtatctttcatccaaataccatagtctcgagtgaatatcggactcactcgagcgaagccattgacgaagtcgttgaccgaaggaattttgaactggaattctggaacttctttctgcttttcagcagtctgtagtttctccagatttttgttcatcttcaccagctgcttgttggtctcattttgagcgcggagttgtttcctctccatgatctctttcttgatcttgtcaagaacttgagcaacttcagtctgggatgtttgtgctggctcagccatggctcacctcttacaccttctgtgattgtcctttgtcaacagggactggcgtcggttgagatgcaacagactgatttgtctgaggaggcagaaccttctcaatcatactgtctttagcgatctcagcaacacattgataatcgttagtcaggcgtgaaattttatgacgaattttcgttatgatataatggcctgatgataacttacttaactcggccaggttttcattttgtttcggcctgtttgacagatcttcgatataatacacctgaccaacgttcagacgattgtcaccaaccaaaagcaaacgcatgaccgtagatgccagactgaatttgatgacacgttttgcataatcaacctgctcagcaccatctggttgtgcttcaagataacgaacgttctcacgattaaattcgtcagagaataaagggtatggatccagatgcgctgtgtcagcaaaccattcggtgtacacacgagaagtaggcgtaaccgttttggttctgaaatcatacaccctttcgtctacagccaggacatcatgataattcgccatgaattggtcacgggccaatttcttttccgctttgattatcgtcctcatgaaacgctcagagttgaagttgttgttttgcagcaacggggcgtcctgtggatcacggaagaatttcttttcaagagcggcttcttgtttttcttcagccgtcatagtctgattaccttggttgaacaaagtagtcagacttttgaaatgatatcctgtgaaatcttcatagaaaacaaatggcatgaatatctcatcataagaccgccgggccatgtaatcaatgctcttgagtacaggccaaagcggtgtcgcgaatcgttcttggataccataagttggatctatgtcttcaaatttagtgcgcgattcgagcatttcaaatatctttgccgccatatcggaatatgatccttggagaccaaccgatttacgcagcatgctatctttatatgcatcagtagtgaccaggtgcagccagaacgctttcttggctgaagaatttgactcatcagcgacacgcccaacccggctgacccggaacgataatgcggtgtaatctgtagccgccggggatttgaatgaaatcacgacttcttctccaccaaggataggcatcgtgtccagaatatcccagccttctttgatcaacacattggctgtcaatgatggtgaaacattctcttccaaacccaaatcttgatagatattgaattcttggaataatgaagtcagatcatatggcgttggggttcctccttccggtgtatgaggaaggatggccatatatttcaaatcaaacgtcgtggacggggttaaaataccgtcttgtgactctttgttctcaatcatttactcagctcctgttccagctggctgacaaacatggaaacataatcaggatcaaggacttgaattgcacgtttcgcctggtttttgttgatggcatcatcgtggtatgatatcccggtcaaaccataatttgcaatgatttgggaatcatccataccgtccagaccgtaagccatacggatagctctggcatctgtttcatgcccaaactgatctacatagtatttgatatcccacataccatccaaaccgtattgagcgatcaattcttcaacgatccgttgctctggctttggccagtcattattgatatccattatgctgttgatcatacatggtatccaaaacagctcgaaggagccatagacacgctctgcaaaggaccttggggtttccccatcataaatgttatacggcaggagaagcccttcgatgtccttaatcttctgtatgatcatcacacggcgcgataggttctgtaataaaacctgatcatcctgctgacaatcaattagctgatgccagacgagggggaatttctcaaagaatttcataatcgtctcctggattagaagctgtcgccttcggtatcaaagcggcctttgtgcagaggttccagttcgataaatgtcatgtcaatttgggtagacacaatgctatcatctttgtggactgcatacgacgaatccggggtttcgttgacgaacatgtttgacagaacgcatgtcgaaatccggtgcaaccatttgttgcgttcaccttgtaccatgaatgtaatatcaaatgtcgacgggtgcaggtaaaacgcgctggagttcttgttgtatttgtattcaggatacatatgcatcttgaacagacgaatgatctctctgaccattttggcttctttctgagagcgcggtgtgaatttgaaagtgaatgggatttcacggtttctcaccccctggaagatcatttccacgtatgggttcgtcatagtgccggtgaacaactccagagtatcatgagcgttaatcgtcggcaggaacgggatagactctgaagccgattggatagccttcgtcgcggcaaaccgacccatttccttaccaacgttgagagcatcaccaagtttgaactggctcatatcctgggcagcgcgggaaaggaattgggcacccataccagcgagacccaactcagagccgttccagccgacgccatagttggttgtaatggattcgggcatacacaggacaatggactcgttagaacgcacgtgacgcgcccaggcatatttgctgatggaccctgatttggtaccatacacaacaggagtattacccagcgggttctggataggattctgaaccgtctgtgttgcggtgcttccataagaagaaccagagatcctgttgatgttgaacagaacataatggccaagggttttacccccggtgatatccagcggatagaccaattgtttctgggcctgtgtcaagcctttggtgttcagaactttgatcttatccagggtagacttgaaattcgccatggtcttcagcccttaattagaaatagaatgttgacactatttaggactcaattatggctatgtatcttgtataccaaataaccaatctcataaacaataaaatatatgttggtgtccacaaaggaacgccagatgatggttatatggggtctggtcgtgtcataacgagagcaatattgaaatatgggttagagaatttccgcaaagatatattgaaagtgtgtaaaacatcagaagaaatgtacgaggaagaatcccggatagttacccaagaatttatcgacagggatgacacatacaatctaacatgcggtggatatggatcatttgcacacataaattcagatccattggttagagcaaaagcttctgaaaaggcgctgaaaacactaaatctaaaaccaaaagaagaattagaaagaatttacaaatctaggggatttcctggagaacggaatttttggtttggtaagaatagatcgggaaagaacaacccaagatttggttgtacggtagaccaaactaccaaagaaaagataagagaatccaataaacgattagttgaatccggtttggttgattattctaattgtaaaggcccaacaacggtagaagggaagaatgctatatctaaagcaaattccagggaattcaaattcatagatcctgatgacaatatagtcactataatcaatcttgctaaattttgtgaagaaaacagattgagcgaaggttctatgagacatgtacacagtggcagaaatatagctcataaaggttggaggaaagcataatggctatgtatcttcaagggaagtatgcgccaataaatccccaaaaatatgttggcgacgttaaagacattgtatttcgttcttccttggaattagtggcatttaaattctgtgatacaaatccagccattgtaaagtgggggtcagaaacttgcgtcatcccttatatttcaccagttgatggtcgaccacatcgctatttcatggatttgaaagtatggaccagatcagccaatagcgaagaactcaaagtcacattgattgagatcaagcccaaagaccaaatcaaggaaccgaagaaaacgaagacaatgaaggaatcaaccttcaataattctatgcggacttatctggtcaatcaggctaaatggacagcaacccgagagcattgtgcaaagatgggatggtcatttattatctggacagaagagcaccttgttcctggggaagatcctgatgtcaagaagcaatttgctctcaggtctaaaataaaaagagaaaaggaaatacaagatcggcggcgggaagagaacatcagggctctgaaagaacaaatgaaaaagaccatcaaatcgaacgaaccaaaggaacgtgatgatggtctcttgttgccttaacttatgatcagctatgcccgggagctatgcattttaatttatcgcgactgatataccaaccatccttccgggcttctttagcacattcagcatatgtctcacccccatatattttgggatacgacgtgctgtattgagaagatctgtattgagtgcagtcagcacaatcgcaataaagttccaatgaataaccagacacgatcataatcagttatccagttggtcgtaaatcacgcgacggaaatcattacctttggcacagcccttggcaacaagacgagtgccgccagtaccaatgacgctgatcgttgaaaaccgcaggacgcgcccggtgatggactggtcgacctttacggtttcaactttacccaaacggagttcatctgcatcacgacggataaaccctgttttgaagataacgcgcttgttggtgacggcaaattcagtcgtcaggttccgaatgatcgtgggaatcaggaaaaacaggctgataccaaaagtcgggacgaggaatacagccacccagaaatagacccaaaatccactccaccaggtcgggcgggtaaagccaatcacgtgttcgttctggccgagcatacgatctacataacgcattttgttttccttatttgtcggggtttacgcaaaagggagttgtggtcagctcgcctttatcattaaaactgtatttcagaatggcaaattggtcaaccatacgatagacttcaatgccggcattcatcatttctacgataccagtggtgatcctgtacggttcacagtagatcactttatcgatcttgccgctggcaataatacgtttggtgcacccagggcaaggactgtgagtgacgaacataaccaggccacaccaatctgccgcatgttgaggtaaacggttcagagcattttcttcggcgtgaataacaccgtcagataccagctggccgtctacttctatttcgcacacattaggagcgccgggcgcggtgccattccagccaatagccaacggctgatcaacccgaggatctacgataacacaaccaacctggagacggcgggcataactggttttgccatatgcctgggctgctctcatatgggcaaacatcatgcgtggcttaatcatgggcattgacctcttttgagaacatgaagatcaagtcttcaccgtcaaatttgcatgaaactgccagggatgcgacccagctatggatgatattgctgatgacggttcgcatttcgtctttcagtgtatcattcacttcgcggcccgcgaatttctcaagcgcggtggttatgacattatcggcatgaggataatgattgacataacgcatcagatatttctcacgcagaacgattttgtccgtaaggtcagacaactccgcagcttcttctgaataaaggcgttctttggccttcaattctaacacacgttcatacaactcttttagcggcatcataatggcatctcctaatgaattaaggagagtatatactctcctttttcaatacgctttcaaatttagttcaggcagatttctcgccccagcgcagtcaggcggtagaactggatcactttcccacgagcatagcggtaattgccgtcaggggcgtcatgaccgccatcatgggttacagtaaaccaaggctcaatcaaccctttcttgagcagagactccccggtttgggtatcccaaggatcacccaggacgttggtaagatgccggctcggggtaaaattccaaacgcggacacccttttcgttcttccaggacttgacacagcgtttttcatgacgaccatgacgagtgaggcgaacgccgtcctcaaaattacgcatacccagcatataattcaattgatgagccgtatagcgaggccacttttgagttttcataacagtatctttcgctttcataatgattccccattgtgtagctgtaacagttcttcaaacgtagccgggcggcgtaaatgatcccagcttgagttcaagtaatccgggttccctactttgcgggaatgccaatgcccgtgaacattatattcccaacgatccaggagtacgggcacatgagtgacaatcactttggagatgctgccgtcactccgagccatcttgtattcaaacaaagaaccgaatttgctgatccattcactaaggaataactgcatcagcattgaaaagctgtcgtgattcccctgggttactttgatgttgaagttgggacgccaatcatcaggaaccttgccatgcatctttggtaggttacgcgccgcgccttctctcatcagtttgatgaaagcatccgggccaccgaagcatgtgtcgcctgtaatgatcaaggaatcatcccggccacacgtttggaatatgctgtcgataactgcgatgtcgtgctcatcgactgtttcaaacccacgtgatttggggatctttttatgtttcaggtggggatcacccaaaaagaaaactttacccgccatattcttttcctctgatatcgttatagaaattgattaacatattgtcagtccatcctgaccagtcgaatacatcaaaatcagacacaccttggtacatattgatgatggcaggtgaaaatatgacatcaatctgatttttgtagttgtcattcacctgtactttgatccagaacaaagatcgatcttccaggatatgcgctaatttaggataacgagaggttatttccaatgcccacacatctaatatagaacgaaaatcatcttccattttataaatgatcgccgcagatatcggctggccataatatggactccaggaatattgtgtcacttcctgaattcgggataccaatggtactaccagccccatctgatattgtgccgacaacgaagggatagattcaagatgtgccaatatctcttcgcgctcaatctgtgttaatttcattttacacctcaatatgtcccacctcataacgatgacgggtacaggccacacaaccgcagttctttttcagaaccggatattcacaccaggtcatcatcccgtaaagaggacgaagggcttcataaaaccaggctttcttcaacccgatcatggggaacaacaattcagccgggcgattttgtggatcagccaacatagcatacccttccatgatcttattgaaggaacggatatactgcagggcatcatcaccgttcacatatgccatgacatacgtctcaggatagatagatgcaagctgagtgccaagcaaccatatcggggcttgggccaatgctgaacggaaaggtgcagctgcctctatctttaacacaggtgtttcatcgttgtcccaacgttgtgtcaattccgggcgatatttttctgcccattgcctgatctttttccttgaccacatttcacgccgggacttgaacgagttgttctccaggtcgcagtagatcgtccgaacataatatccatgagcaagcaaccagaacagcatgtatgtactgtcaacaccgccagaccagaacaaagtcacacttttattattgaaatgcatgggtaacttttgtccttccatcacgtcccgaacaaacactcgatctttaaattctacattgatttccataattacaccttaatcatcccgagtgccttcgcaatatagccttcagcccctttcaaagaatccttaatgattttatgaaattcttcatatgacacgacatggccgtcagccatatatgtgttagtcgtcatgccgtgagaatcacgggcataataatggtataattctacaccaccaacattgaatgtgacagttctggtacgggatatgctcatgatttgtctcgggttatatggttatgccaaaatgatacgttaatttacatatagaaaagccccttacggggcttcatctttatcagatttataaacttcccatcggcctattccacgccattcaccaagatcgttccaggtgcgagtccctacccagccaccaacttcataataatgacatatacatgcccagaagtctttgaaagttactttccgagttggtttcacacatgcgatttgccagcgggttaagctgattgcctggaacaatggatggatataattgctatagatcaaatatatcgcgatgagcgcaatgcatcccacaaatatcataccgatagcagtgaaaacaaacattattccacctttaatcccatcagatcttccatggttttctggatgcggagccaatccagcgcagcatcataacgaggatcatggtataccatgccttccagttcccatgccttgatgccggcatagcgatccatctggccaacacctttcagccagctaacgatatcaaatgtgtggtgataatcccacggctcattggagtattgcccgcaagtcacttcgatgatatgttgggctttacgcagatcaaatagatttcgatcacaccagtcaaccgacctgggatcaacccccagtcgatgacaccctttgcgaatttcgtcggccagctgatagatggagatatcgtcttcctttggatacaggctgacttcacgggcggcatcacatggattatatttcccgtttcccagccaccagtctacagtcactttctctttgacacgaccgaggtcgatttgctctttgacattcaatttaatgaatgtggtacgttcttcaactagttgctggagagtataacgtttggtcaaatcagctactgtctgcgcccaggataacataacagcatcatcccagcggcccagggtttcactatcggcgaccgccaaaatatttgatttatacattgttaccctccacccggataatttcttcttcagaatcgacgacgttgatatcatcatccagcgcgttcagattttccatgtcttccgcaaacttgtctacttccatgatgtagaacacggggacaacccggcggcgagtgtcttcatacagggtttcagccagcgcttccacctggcggacaacgtcatacagattaagaccgccgataccacagccgatagctggcaggccgatatagaccgtttcagaatccttcgcttccataatctcgtgaagttgttcaaacatcacttgtacagaactgataacggaaggcatacgagcatttgggcctgtatagaattgagtatacagattgaagccccaaacacccgtgtcacggtcaaaggcataagacatgccaccgagacgctgctccggcccgcgctcatcgttctggtctgcgcgccagacgtcaggaaatcccagccgaacgaaattggcgatacccgcgcccatcaccgaccagcaattggcgccatgggcgaatccgttaataagattgaaacttttcgcggcttccaacaaattcccaccacgaacgatatacgttgtcatacaattcttctccaggtaatgttgatgtcatcaataaattcaaggcaaaaaacgccgccatgtccttcactattgttgatggacatgatagatgttctctcgtcggtggcgataagattaaccccaaaccctttggacatcaaacggaaagcgatttcttttacgatccgattgagatacgcaggggtggttgccggatcaaaatatttttcgaactcaggcatcaccaattccccttcatcacgctttccattgcgttttcagaaatatattcgatgaaatcattgtcggacgccatcttcaacaactcgaataattcgccaccgacggtgcaaccaaacatcccttctaacattcccttcacgttttcatcgatttcttctgggtttaattgatataatttcaagcgacgtgaaatagcccgaaattgcgcgatatcaccgggttcaaatttggccatggtcatttaccagttatgggattaggcggtaataataccgcctttttattcaataaaggtcttcggagaaaagctgattgaaaggagtattcttcagacgaacttggttgacttgcccggcttctttagcgacgatcgctgcctcttcacgagttaagaaattgccttggttgtcgatgaaaccctgttcacggctatgggttgtagtaatgaccccagcttcttttagaattcttaactgggaattcatcaataggctgtggtgacgatcagcaaccacgatcacgtcaccatatttgttggctgcggccacgacacggcgctgccattccccttccttgggtaggtcacgagcgtacagggcaaccattgtaccatccggggttcctttcacctcagagaacaatcgtccagtaccaccagggagttcacggaaataaccaagtagtttcataatctattcaatccatatttcaggttcaggaatatcgaccatatccacagtctgatttttcagatcgtgaaaacagtcgccaagaaattgtattttgccatttgtcaagaacaaatgacagcgtgagcctgggcgatctttaaacaccaatagacttggagtgaaagtgggtgcaacaacatcattgttccacgcccagatcgggccttgttctggagaacccttcacgcgatatgggtgaagcatattacaaccaggacattgaaaatataaagaatcacccatagacaataattttgaactcaggaatctgctcatcagctgtccatctcctcatatggattgtaagggcgcaattccccgatcagtttaggcaacaaggcgaagccgaacagattgaaggaacgcatagtgcccaccatgacaacatcatcgtcttcgtcagtgatatctttcaaagaacatatggggacatatgcgtcgaaatcttcaccttccccttcttctacaagggcgaatgcgacttcttctgatatgaagcgagggatgcatatgtcaagcacccaggcaaggaatacaagaacggaaatgctgcggaaatagaacatattaaagccctcgcaggtggcgggggcttttggccccctgtattatagatcgagcagagtttccaactcgtctagatcttcgttgtaaagatctatgtcctgtttcttatttaactcgtcccgttgaatttccagattcttgatctggttcaacaggcgctcgcgggcgtccaatgtaatcgaggatagagacatcttgaacaaatcgtcaagatcaccatcaaagtccgggtagtctgtctgaaatagtgctttcaattcagtcaaactgcgacgcatatctgtcacaactgcccaaccgataaacagagcacgattgttcattttgtggatacgggcgttgagatcagccaacagatattggcgacgatcttcataccgttccagccgatagttgaagaatgcgtacagcatatctttccaaccattgaaacgttggataataccgcattcgttccaggatgtccaggtcggcatttcagctgagtacagccggaacatctgttcaactttggcgtcatctagtttagacaattcaccacgtttgaacacaacagtgatatcccaaccatcttctgtagaatcgttggaatactccgtgagaatccctgatttatacagcggaagaataatcttggtttcataatccttggcgaaccagcccaccgggacttcagttatgcgcagggtagtggcattgagacgttcatacacaccgcgacagtacactcggccttcctcagtgtatcctgtctcccccttgtaaccattccaatacggtttcaagtcatttgggtcttcgccacggagaagcgctctcagggcatccagaacagactttatgctatggcatggggttttggtagcatagccgctaccgataccgttcataccattcacgaggaacattgggataaccggcaggaaaaactttggttccagcctttcctcaccaagataattgtattccaggatgccttcatcttctttccgatagatcttacgaatcacgccggagactgccacagaaatatatcgcggtgatgacgcttctttacccatgattgagccgaactgaccatcacgatcaaaatacgggatattgttcgtccctgggaaagcctgtgccatattgacgatagtgttgctcatgttctcaccaccagatttgtaattggtacgggcggcggcgaacatacccaggcgatcaacaatctcttccttaccgtattccaacgcagcaaacaaaatttttcgctggctgggcttgaggctgtcaattaacagaggaatttggcgaacgctgttaacaaccgaaaattccttatgatcggtgttaacaaatgatgtcacagtaatgcttttggcaaccatcttattcatcctctgtttcaaacaagcaaacgtcactaaaccaggtcttgcggtaatccgacgccttatcaccgaacccatcattcaatgaattcttgtaggcatcatccagaacgaccgtcgtagtatacgcatccagattgtttagaatacgtttgaaatcttcggtgctgttaccgcccagaccttttagatatttcttctttgtgatctttttagattctggggtcttcatgaactcttcatattcggcgttgttcatgaactcatgcatttctttaccacaccacacgcgcatgtacggggagcgcagaagtttaagacgcccctggcgcacatattccggccagaacgtacagtacatggtaatcaacaggccacggatatgaatgccgtcatcgtccgcgtccgtagcgacaaccgtgcaaggataacggctggtgtcaatcggttgccccggtactgcgccgccgtggatagtacacaggttcttgaattcttcgttggccatgaccttggcacgcgaagcgttcaaacagttgatgaatttaccgcgcagaggaaacagaccgattttcttggtgtcacgggcattgaggatagggttagacgcgctatcaccctcggtcaacaccagtacgcagcctgaacgatcaccacgggccgtcgctggataatacttttcaatttcacgataatcccgtttagtgatttcctttttggccttttcaaactcagcgtcatcctggtcattacgcaaagccgccagttccttacccaagccgatggtaacatattccagcgccttacgaaccaggcgatcagacggtttgtatgttgtcccaaattggctgacgggagtggtcatgcgctctttagtctgactatcaaaccgggggttatcgatgtcagcagatatgaaaagcatcatatggttcttgatcatcgctggcttcaattctgtcttgaattttttagacagcggagtacgaatcgcagcaacgatctggtcggcaacatagtcaacatgcgggccgccgacgtgagtagcgatactattgacatatgacgcatgcatgaacgtaccgttcgaaggcgcgattgcaacagaccaatccccagattcgtctacagatgaaccctggcagaagtaatccacgaaatgaccaaagcgatcaatccggataggcttgccattgaggacgatcttcagacgagggttacacgccgctacttcaaatgcccggcggtagatcatcagcagattattgttatccagacctttaatgcccagacgctcataatctgggatccaggcgatggtcgtacccggcgcgttcaggttactgatcgtcggctctgaacgtttgctcatattgttctcaaacgtctggagataagacttcttgccgtcgttggtagacacccggaaccattttgagaatacgtttaccagagaagcgccttcgccgttctggccaccggatttcttgttgttgtactcttcgtcatcatcgttgaagttactaccagcatacagggagccgaagagcatctccgggagccattctttggtctcaccgtgttttaccacagggatgccgccgttgtcagcaacgatgatctggccgttcatcgccattaccgtaacagtgatctcgttgaggcgtttcccctcaggagttttgctatggtcaacgcagttcgtgataatctcatcgaactgtttgatcagcgccggggaataggtaaagttgtccttgaacacaacctgatcttttaccgggtcataaacccaaaccgtcccggatgttgaacggatactgcccagatggcgttctgggcgaagaaggatatgctctacatgggagagcttcttgtactttctttcaatgttaacgttactggtcatcttcctatcccgtcaatgtaaacacacaagattatgtatgggattggcttatagaccaaatttgccccgccacttttcgactttgtgctcaaatgtgtgctcaacttttattctaatcgatgacggttctgcacaatgataatacgttcttccttcatcagtcccatattgaggggcgcaaccgtatgacaatgccaattgagctgtgtatctgattaaagtgctcaccaggaagtttaaattatcgctagatctttgtggctggtttagcaatctggtgatacgccctttcatatgatggatcatagctaaattcttttctggccctgtggtggtatcacagaaaaggtggtcttcaagggaatattggcggaaatcagaatatccttgcgccaatgccatttgggttataattgaatcaataatttcatctttcgtcatattaccatggatttgtgcatctttgtaatcacagacatacaaaagatcaactgctgagataatcacgtcagctatttctccattgagtggttctgaagctgcgatgccgtggtaaacatcggaaagttcacatacttcttccaccagtttacagaagacgaaaaatggagaacgatctggattgaccgcagtacattcatatgacgtattgacgatattacgcagaaatttcatttcaaatatccttctaggcggaagcggttgatatgctgtatgataaagtccatagagttttgaaaactatattttccctggtgttcatatgcatgtatcaggggaaggcggctgtgggctaattggaaacgcagcttgggcggcatcgtcagcaatttttggcttgttgctgcaatgatgtcgtgtttaaatttggggttatcaggagacagaacgacaatctgcgacttggccagagtctgaccgaattgtttggcatcatttccataaaggctacgcaggtcatcgtgccgatatttgagccaataccaatagccttccatcgagttgaaaacaccatcgacagtatccatgggatggtatgcaaaatgagacaggaatctccccagctcggtgcggctccgactgtaaatgttgtaatgcgtcttgccttcatcatccggcgtcatacgatcttttggaacattgagtaataggaacatgatataggattctcaaatcaatatattgctgtgcgtagtagatttataatttcctgaatgcgatcaagaaactgacgacagataccgcaccaaacagcccagacaatataaatctgaccaaagggaattcaggggccgcaacaagactgactgcgttttccaggcatatcatgaatgatataccacaaatcattcccagggcgaactgattcggtttatgacgtaaacgtaccatttcacacctcctctggttgattaataggggccaaagcccctattatctagccaagaacaacaactagtttcaaattagtaaaagccgagcgactatcttttaacattttatgtacagcatcaagacgtttgggatcgtgtaaagtatcagagaatacgataatatcagccttgtcaatcttggtgcctctataatgactagtcgtggtggtactgtctttcatatcaacatgcggtgcaggtgcgttataaggagaagaaggagaggaagaaaagaaagaatcacgctccctttcactgtgaaagacagccataatacgaacattattttctgtttggaaattgtaagacataagtttcttcagcgctgctgtatgacctgtctgcctaatcatacggtaatatagaatattaccaggttcaataacatctaccaagctccgcgattcgcggtctttttggatttcgtacgcatccaatataagttgttgtatcatctcaacgtgagcattcaatgagatttctactctgcgttttaccatagattgcatttgtgtatcctcggttaagttccgctcatggggaactggtggattataccccgagtaacacataaagaaaaagaggccgaagcctcttttattcatcatacttgcctgtcctgaaattccatttcttggctttgctgaagtcaatatccttgaagatattcccgaagagtttcttgaactctgattcctcttcaagatccttcggtttcttcacgggttccttgaccataccgccttcgggtttccccacatcggcggtcgtggtggcaggaggagaagaatcttcaaggaaatccttgaaggtcttcatattagactacagccatttcacaacgggtagaagtcactgaatggccatcggcatcagaaacaacacaccaatattcgccttcgtcggcagcatccacagcagtcacaaccaggttagcggttgatgcagtcgcgttggtgccagcgtcaataaccgaacctgcgccacccggcacatcagagaaataccacgcataagtgtacggggtagtgccgcccgcagcgacaacgctaaatgtcgcgtcttcaccgctggtgacgtctttagttgccgtcagatcggttgaaagagacaaagcgcccgcaacggtgatgacggttgaatcgacatggttgccttctacggtgacgccatagacggtaacggaaccggactgaagcagtttgaatttaccgccgccgatatggaccgctttagtcacgtcaccggaataccagttgacgcctttataggtcgcattcgccggggccaccgtcgccagaagttcaaccacctgtccaatttcaccattggcggttgccggggtgatagtcagaccagtagtcaggactgcgctgggatcatgaatttcgtaagataccaggaagccgacgggcttcgaaggatcgattttggtcacgccgtctgcttccagattagatttggtcagcagtgcatcaagacctttacattcggtcagaatttcgttcgggtcttggttcagactggttttctgccagcccttggcaaccccggtaacaacatgaccacgttcggtctccggtttgttgcgtacaacatacggcgcgactaatacattgattgttggcatggtttcctccactcatccaaatcgttgttcagagccatcatcagctcgttatctggttcataagaaccggaacataaatcatctctccatacacctaacgtcaacaacgctgctttcagacgaggatgttgggacttgtcagttttcaacaccaacattcggcatactgcttcagtctcaaacgtgttgaaaagtgtaatcaattgattgataaggactcggggacttttcccggggacaaatcgtttcaatgattgattaattagcgaaattcgctgaatgtccaccatcaaatcatctcttgagacacaaggagtaatataatgtctcagagcgtattccattaaattgctttcatcaacaataggcatatagaataagttcagctgttgtacactgaacttatttaatctgaagtttttcgatcaatttggcgatcagtttgtcccggtctgtttctacaatccccagaggctcacccaataccgacagatcgttgatatccaggagattgagggtttctactgtaatatcagtgctgatgaccgtacccggttctatcggtcggccgaatttgtcacgaccataacgtttgagggtactggcaagcccggttagctcctccagaagctccttatcgccgtttttatgctcgcacacccaaccgtagtcgccagcatataccgtggcgccgtcgccaacgttcgggatgttatccaggacgcgctgcaggtatgatgggattttctgttcttctactgcggtgattgggtcaacaacagcagtatctttaactttcggtgtcttggccatgttcagttctcctatagactttgatatatttaccacagcaattgcattggtattcatgcatacaacgcccgtcgtcattaaagtcacatgccccacaacgacagaataattttacgaattggctcccttcaatattcctggccgggaaatgtttgtatgaatattctcgcatttcaccgtcaaattgaaaagaatcaattaagaatttttcagtcgttctataaggcccaaatgtctggcgagcatatttgaaataaacatctctggtttccatgaattaactccaacaaaaaggggccgaagccccttattttacgctgtcgtgattaacgataaagcccttcaacgtcaatggatttgtgttgacggttatattcagtggtgtagtcgtctaacaccagatattcacagcagcgaattttactggacttgtagtcatcagtgatcgacacgatgtccttcgggttcagcttacaacgaacaacgcgctgacccaagtagccgaagcattgcttcagatatgccagcgagcagacgtgcagcccataggagcacaggtctttgttgtcatcgttaacgaaggaacgcgccatgcgtacaatcgttcccggagtattgtcgatcgtaccagagtgcttgtccatgtaattgccacggaccgacttgtacagaatgatgtcaccgtcttcggcaatctcaatatccgagtatgccatgaattcatagatgcggccagactgtaccagggacgaactcgggttctggaacatcttatccaggaagttcgtcaggcgctgcatgttgctataatcaccacgcagcatcagtgtcaggatacgcttggcgacgctcgtgccagtgatatcatgtccggaccaacgaacacggttattgctgatgtcaaccaggcctgtcgcaaatttctcaatcgcttcgcgcggcttcatcaacgtatacgccagtttgatgtcacgagatttaatcgcttcaacgattcggtcatacgactggtggctggtcgtgatcgtttctggtttgccatcgatgacaataacgacgctctccggcaggatcatgatctgatgttcgttcaggaacacactcagctctttatcgccgaattcagccttggtctgtttgtcaccgatttgctgcgtttctttcaattttactttgaaagtcacggatgacagcgccagacgcagggtgcgaccgaggatgcagtcgtaataaccaacccggcggcgggcgtccatggagccgcgcatcggatacgtgtcttcgtcaggtaaaataaccgtgatctcagaagtctcacctttgtaaccatcaaccagagcagatgccacttcggccagcgcaacgattttatcgccgtcatttttagaattaaatttgtctgaagactcagacggtttcagctgatcgcgcgggatcatagctgctttgatcccagcataactgctgtcgtctgtataacgcaaacacaggaattggccgtggttctccatgaacttgccgacataccactcttcgtcgtctttttcatatacagccacgccgccttccaggacttcgaattctttcgtagcgtccgattctttaatcggtgaaatgacggtgatgttgtttgcttgtttgatgatacggaccatcagcgcacgggcgatagttttggggctgacgccataagccgatgccagggtggtgttgctttccccggcctggctctgagactggatcagttcgatctgttcggttgtcagcgatttcagagaagccgggtcaacacccagctcctggtcggacacacgctgtaccattgagcgaggaacgcccaattcgttagcgatagaattctggcttttgccatccttcaacatccgcaaaatacttttttcggtagcagtcatcttgtagttcccactttgtgttagacggggctattatgccccgagaatacgttttgaaatagcggcgaagaaaccctctttgtcttcttcaatcgggttctgagccacaggcgtatacgtcgccatcagatgttttaacaagttatggcaatcgacgcgataccggttatatttcttttgggtctgcgaaatagaacgtgtccagctgatttcgcaataaccgttggttttcagcaattcattgatgctggagaacaattgaatcatacgcgcctgcccatggcggtattggtcaaagttctttttgatactaacatggaaatttaatttttccatcgcttcgttaagatctttgacgccaggtaatcctttcttgttcttactgatttccttcagataatcccattcagtttccgggattaattcaatattattcttatccagctgggatattctatccttcagataagcaaacttttctgggataccttcgtgagatttggccagaagtgactccgcatacgggatacggtttatgatacaacgagtttgctttcttaatgctaacagttcccgggcattcttagatttgaaatacggcatatggcgtttcaacaacatttcaaataccgcatcaattggcacgaacacttccgggaactttttcatcataggaaccgatttacggcgggcaaggatgactttcttatggaagttcatgaactcaaatattttgttcccctcatcgtccataggagtgttgtgcatacattccaaaatgctccgggcaacgtattcattaacacgttttccacgaatatcatggatgctgttagttcctgatatctcaatataaacaatttgcttaccagaatcaatgatactggagatatcttcagcagataattctctatccttatagaaactgaaacggaacccttcgtattcaaacatccctggatctttttcgaccgggggcttcacatactgcatatcatgcatgaagtaaacttcacttggcacgagaatttccgaaataacttcgtaaaacttatcggcaaataccaaatggtcaatagttgtctcttgtttaccaacccaagattcaaaataggattgaagctcttcgtgattcttgtatgcgcctttatggttttgcaataaattgcgattggtcagcaaagaatcattgggcttaacaacgataacaacatcatgattatttcgcgccgtcctgattttcagattacgggcgcggctggagttatcgataataacagcaacagattttttctcaccaacccaaccataaacgtcattcagcatgagtgaatccttggattcataatatccggcatcccaatatatttcaagataataaggattcccggcagtacggaatggagcgtcaacatcgatgttacgttctatatcaggggtgccgttgtaaacatatttccctttgtagaagcgggtatcagccgggaagtcccgctccatcattttgcggaaaccgctaccaaacatgttggtgaattcgtctttcttcatatacaacgccagcgggcctttgctggccgccaggttgagttcggaaatcttttcctgcataattttattcgccactttcttgaactggcgattcagggtttcgcgagtgtactcatcgtaagacaagtcttcacgggatggtgggacattaagctcaccgagttcaaagaaggtataggacgtcgggaacttttccagaatagaagaaacgtcttgttccagttgttccagatcaatagggtatgacaccccgcccatgaccgcatagtgggtattccccgtccccttcggctggatataggtattccccacccggttgttaaaactgatgtcttcccaatcgaagttgtatgagtgattcgtgacttttgggcgctcgttgggcttcataactttgccaagacggatcagctcttcttcaaacgcacggaagcgactgttcttgaccgggactttcacagacaaaccattccattcatctgtgtcttccggcgcaggctcgcgggtttctacgtttttagtcaccaggtcaacggtcgggatacggttcccgttcagatacatcaggaagcgatagatcttcccttcatagcgggattcaacggtgaatgaatccgacacagagaaaggtgatttggaacccagaccgaacgcgccgatctggccatcatcgtcttctttggtactgttgaacaaagtggtataaagcccaggggaacggatgatttcgccatcttgggttttaaagaccaattggccaccataatacgaagagaaatcgggtacacccaggacttcagaaccttctgggatttcgtcttctttgacgaccatgttgcccgccagaagcacttcatcttcacgggccaaaataggttcacccatgatctgctccagcgaaaggccgataccccagtctttgatttccagccatggctcgtaatcgtccgggagatggacttctacgggaatgttagaaggagccagatacttactgtgcagttggggcatcggggacagagaggcataatgagacggcatccagcgctgtaaacggttacgcatgttgtgggcgtcaatcgcattacaaacggtctcacgaagcgccgccgcttctttataacgataaaggctggagaacaacgtttcaaataacttatcggtcattttgacgttgaacacattaccagatatagatgatgaagagcggacgaagtgctctgacttgcgcattttcataacgaagaagtcctatcagtttcaaagggattacacagggatatgatacgtggcgacagttcaattgaaaaagccccttctcaggggctttagttcacattattaaacgagtgatgctttgaagtcaaaggtcgggcgcgtcgcccccggttccagaatttcttccagataaccgacgtattgtttgacaactacagtcggctcggcacgattgggcttggttgcactcagatccagaaggctggaagtcacctgctctacaacagtgcgcttgatctcaaaatggtagcggctcccgaaggcggcgatctcgacttcattaattttgaagtcagacagttcactgctgttcaacgtaccgatattcaattgtgagcgcagatgctcaacaatgttagaataaatgtactgcggtgtgatcagctgttcaatagaactcataatatatcctctaaatttcgggttcaggtttacttaatcgagcgagttcggctcgaagatacagaatttcgtcggccatctgtttcccttcaccaaacatgacatgacacttcaccttcctcggctccccttcagatatttctaggagccgttcttttgttaaggtgtcatcactcatttgcgtttccttttgttctttccatgcgttttggctttcttcggtcgtttcaccgatggtcgaccatggcctggcgttcccggccctgaattgttggaataccaaatatcatcaccgcgatggcgtgattcctgataactacgcgccaatgcttgttctgcactgataacagcaccagccatagcaatggcaactaatgcctttttggaacccattataattctcctttggcggcataggacaatgccttgacgatcatcacagccaactgcatagaaccatagtcaaaatcacgttccaccaatgctctgatttcatcacgagattggacttctgggcgatttttgctctgccgacgttcttcctgatcgattagatcgcgcagcatcagatcagtaaaagaatattcgtcaaagttttccagatattcctggatacccgatttcggtggattggtttgtttgacttctggtattttagactcagacgttttcatggaacttctgagtttatagatcgtggtgctggcaacttctcgccctttgttcaaggcagtgaagtcgacattttggccccaagcgttcttcaccggatttgaacaacattgaccgaacaaatcagaccaaccatcatccagtgccaggagcgattgtaccaacgcctcataagttggttcatcagattggctcatttcattacattgggcaacgatgttgtcaacgccccaaagaggattcaacaattccatcattttatctgattgctctttagaaaattggatgccacaaatcatagatttgatgaacttatcatatgctttcacagtatcgacaagctgttggtaagtcggtttggtctgcgagttcattttctttttcctttgttgcgtgccttactggccaaacgtttattttgtgctgccccgcgcaggcggggaggcttttgataacgagcatctttcatcatctgacgctcgtctctggatgtttcaataaaatcattgtcatctaatttgcgccttgatttcaggctgttgataagctgcttcacatcaaattcagaacagatttcatccaaaatcacgatgcgtttgtcgttctcttcacgacgtgccaattcacgagctgacatatgatcttcgatcgaaatctgctttatttcccattccggatgaagatcttgtaatgcggccttcatgataatactgtggtgaccgcccccgatgatcacgatctttttgggttctgacatgattttgctccaaagaaaagggatagagtaataataccctatccctgtttattgaagaattaagtctattcagctaatgcaccacgcaaatcctgaacaggctggccgccaactgccatgatatagatggtgttgatagtttcgaaccacgtcagttcgttaacgtctttggtgtacggcgtcaccggaatagaagttttgacttcgttcgtttcagtcagcgggtgtgctccaaccagagtaaggaatgcacagcgcccggtcggatggataaccccttctttgaacatcacgatctttttgcgatggttatccgcttcacccagacagacaaccagatgatgaatcatctctggtcgggtcagcaaagtatcttctttgatgatcccctgcttaaccgccgaaataacgatttcatccaagagagcctgttgttgatccagactcaatgattcggtgagtctcacgctgttgatgttaatggccatgatatcaccctttgaagttaatcggagcctgaacaccagattcaaaagctgcctgggtacggctatcacttacaacctgacaggtcttttccagatccagacgcgggaaaccaaacattccggccacgatattgccagggaactgctggagccgggtctcatacagctggcacgcatcgagttttttggtctggctgatacggaattcatcgcggcccgcgctgattacgatctgaatttctttgtacagggacgaatcaaactggatgttctgttcctggatccattgcatcaccgctttggaaccgtcggcgccatagcggccttcaaatgttcccttgatgacttccttcaacccgttcttgtacatgtccgggatttgcgccgtttcctgaactttcagagtataagaactcagatagttctccgagtccttgttgaacttcttaacattgttatccagcgtgttgaagccgttgaacgtgctgataagaaatccggcgatgattgcgatcaaaccaacggtagcaccgacgacgataagagaaggactgatactttttgacattttttgtagcctcttgtttagaatgggaaacgacgatttagactaaaattatatggcccagcgccaagatagaataatacaccgaacggcacacaaccgagtaaagacacgatcagggcttcccaggtcttcaactcacgccatttcagataatccatctccttcatagacacccggttgtagcccttgctgatattggtagcgacttcttggaagactgctattcccatgggctgtccagtaagggataatccattgcgggaatgcaactccatgttgttcatgccatctgcaaaagaagtgctcttaccccaatttatcttcatgtctttggtgatatcggtaacgacgatgacgtcattcttcttgccgcccgcccatgcatacaccagcccctggaaatattcaatcggctgacctgaagttatcacccaaacgatgttcacctgacgctcggcacccagagttttcagaacgccgttcaaataatcattccagtaaccgacaggaagattcaaaccagacatgttcagaacccggttgacacgataataatcatagacctttgggtacgccggaatataatctttgaacttctgggcaaattgttcatccgaacgggagaataatgaatccctgtttccaagaacgtagttctgatacagatgatcttgtgcagctggctccccgatcttcacctgcgcccagcgcggcggctgacgcaaaccttgtcggtctatacgcttaatggtcagatcaccgacggtcgtgtgaacatcccagtcgacgtcgtaatcatgctcgtcacaatagatcgggacacaggactggttgcctttactatccgttgaacatgtctgaccacattgatactggtgctcacacgagaccttttctcgagtcttacccgtaacataaccattaaggatttccacgtcagcagcactccccaaggagaatgctgtgtatgcacccgcttgtatcaggcaagacaaaccaaccccgataagggtcgtatagaccgtctccttaacgttgtggtcggcctggtgtctgacaatgaacgcgacggccatcgccaatggcaggatgaaaaagagatagatcataatacaccacccacgagttgggccttggtcatacccaacagttgttctttgtgtttttcatccgcgccgttggcgaccaagagcgcccaacgttcttcatggtacttcggatccatggcttcatcaaacgataggtgatggcgaaacatgattgaggccacagaatggagattatgcgcggttgctctttgcaaagtccgagttgctgtgatatgctgtttttgatactcaacacccataagacgcaattcacgaataatacgaattggtgacaaatcacctttatcatgcaattctttaaaacgggctttcgccgggtgtaactggccttcagtttctttcatgaacagatcgtacaggtattcagcgtattcggtgcgagtcataattttgatccttagcgataaaaagggaacgggccaaatataagcccattcccattattgaagaaactagtattgctcagttatttcttcatcagtgacatcagattaacgctctttccaacaggggtggcctcctgtttgcgttcaacgcgctcttcaggttcccagcgcgtacccttttgcagatgccagatgtgcagaggaacaccagtctcaaagaacacgggcatcttccacttctggacgccgggaacgtgccctgcgggagccttctcacataacagggtatccggtagccaaagtgaacgcgcttcccagagtgccgcgcaggagtattccggccaaatgcgttccatatagtcgatttcatcccaggtacgctcagcatcccacccgatataacgagtgttcttcagacggaagaatttcttcaaccaacacgcgccagaggtctcaaagttcagacggttgatgaacgtcaggtgaccgaactcttcaacgcattcatggaatgccttttccaaatcggcttccaggatgtcacactcttcatcggtaataggacagccatcgatctttttcttcccgtgtttggtcacccaatcatcacggttagaaagaaacgccgcgccattgcgattcgattcactgccttcacggtcacgcagcatgaagccagggacatcgattttccacatgttaccgaacaccatgttcagggcttccaggaagttccaggcgctcaggcggccgaagtatttccaggacatcgccgtgtcccacaactcagtaaactggtcttccttgatggtgcattccagcatccaacggaaagaatccatctgagttttaccgcccagccaatccacataggactgaacacatgggatcatcttggacttgcggtagcggcaatcagtatcgaagcgcatgcgttcaaagttcagattataccagtccgagaagcgctgcatttcttctttgttctgaggaggaaccgggaactcagagtagattgtccacgggccgatcgcattatagcagcaaccccaaaggaacgccatccagatcttgcgctcgatcttttccaggttggtgaggccttccgtgacttcaatagcataatccatcagacgcatctgctggttgtgctcttcagtataggacagcgcttctacccaagccttgagcagatacatccggttctcaggcttgcggtagtcaaccttcagatcaatcgggtacttccattgctcaggggctttatacccctgcggcattttagataaatgtgccatacattaatccttttcgccgacggaacttgaaagttcttcatctccaggatgaggctgaactggctccagttgcacttgatctgcggtgaccgggccggatgcagagttccagatatcgacaaagcgtttgtcagaagtaacaacccacatgcgcttggctttattggaacggtcagcaatgaacgcctgggcattggcgttggttctgacaagaccgacttggcgccactgaccgaaatctttagacgccgggttagtgttcagctgaaactgtgggattacccggttgtcttccgggtaataacggacagcattgatcatcttggcatcgcccttataatcaatagcgatagccacggcatcgcggggaatcaaaattttcatttcatttcctttaaaaataatttatagacaacaggtataaagaacgataagaagccgaaccagtaaaccacattcatggttttcttttctgcttctgacagatcaatgaaaccataatgatacactatcatggttaataatgaggctaaacaagtgatcgccccgaccaataaaatagcatccaaccacttgctgttcatctttatttcctcaacatcatagccagcacgttagaacttttggacagctgtttcttttcatcagccgtcttcttgacaacctggcggcgggtagccttttccggtacgcgatgcgccagcgggtctgaaccaccaacttcacgggtcattggatggtcttcgcaatacttatagaattctttgaagacgaacccagcatcacggacttcattgatgatcatgtgatgaatggcattaccaatgacccacagcggtgcgtcgaatggcaattgggcaacttcgctgccaacgccgttctttttgtagaggacgtcctggccgctgtatgaatctacaacaacttcccaacccgccgccaccatttcagatttagacttttcaaattctttctgataagactcattccgagtccagcccgaatccccggcttctttaccagaacgcccacggatacgagcatcatactgataacgatccggatacgtgaagtacaacagcgccagttgctcaataggataattggcaaacatccattctggacgccatttatcagacagcatcagcggttcaccctcacagaccagcgtatatcccgcgctgagatgttctttgaccagttcgcgggcgatatcaccagaacctgtcgcggcatggatagcgtccatcgaggtccacgacgcaagaccggatttgtttgacgcagtatactggccgacaaacattaatttcagttcatcaaaggccagaccaaacaggcgcgttttatcgccgatggtataagtgacctcgcgcggctcaaggcgagtacgcagccattctatgaactgtacgacacgagtacccttgcccgtgccgcttgtgcctttgattacaatcagttttgacattatttgtcatcctcaatacgccagctcacgccgccaatccacggtgcccaaaagacagccacctgcggaataccgttttcttcaaactttactttatactggtcgtcaaagttatagaatatttcttcgtcatcaggagacatcccaatctcactcaagacacgcttcagttctttagccgccccaacagaggaaggattctcttgagaacggatgtagttgttgatatgaatgatgacgccatccatatcactatcccctgatcgtttgtcagggcattctaccactttcagcaattcgttagacacttcagactccttgacggacaaattggtaatgtgcaaccaggcggtcaacgacttctgtaaaattctcacgcagatagtcgaagtggttgcggccttctaccggtttaacatatatcatattttctgaatccgaaagatccagtttttcataattcccctgaggaacgaagatgctgaaaacattgttccagatgcacgggtcgacatatttcggattgtcgtcaatcaaaacatcgccagcaaccatgtgcttttcatccgtgctgatgaagccattgaagatgttcgggaacttgccatacacgaactgacgtttgctgcgttcgtgctcgggttcacatttggtgacagcaacaaattccaccatttcaaacttcatgagcagcgcatcatgcaagttgttcaagaactctaccgcaccgggcaacggctgcatacgggagtacagatcaggttggcgccaaaagtccatcgggtcgcgtccgtttgacatataatgggtcttaccgccgatactgacatatgaatgtgaccatgccggatgagcacgttcacgcatcaggattgccaaatcacccgcatggttcatataacattgcttggtgatcggctgaaatttagcggggccaacaatcccatccgggagacttgcttgggcttccaggtttccgtcattaaaccatttgacccaaggcgatagactatcgaccattgtcagatcaacgtccaccaaaacccggtacaggcctccgacctttgagttcatatcgtataggcaagtcaggttgttcatttatcttcctccactttatcatatcctgtcgctttacaaccatcagcctggcagtcgccatacaggacaaccatggagtcttttacgaaagtggaacaatgatacagctccgttgttggatcgctgtcatcgtaattacaaacggtctggatcgggccgggagtagtaccctggagggcagcatgtgctttaaccatgtcatccattttggtctgagcctggtcttgagtgaagtccggcccgctgagatctggcgtgtccaagagagcagagcaagcagacagagatactgacagagtgaatgccagcatgattttgtagaacagaacgtttttattgagtttcatattaatcacctattctttgtcaaagggaaacaacaaggggaattatatccccctgtcggttattgaatcaacctttcttacccatcatcgccaatagatttactcgacgtttgtgagaccagccaacgaccgtcagtatagactggatcggttcgatgaatgacttctcaaatgccgtgttgtaatccacccacttcgccatatctagttcttcggggaagaactctggataggcgaaatagttctgaccgaacggattaccagctttcagcagaacaatgttgactttatcaccagattcaatcaacggtaaatcgagttcttcatgtttctctaccaggcggttgtagccgacgcatgccttcgcagcaaagtgcgccccagagataaaggatccgtcaggagccacgcacttctcgatgtcagatacacccgatgccttcgcaatatcatcgacgctcagtttcatgtactcatctttatacgtcttgatgaggtcttggacttcgctttccgtgcctaaaagaatgcgctcatagcacttgatgagacgttcacgacaccattctggcgttgttgatttacgcgcttcaagacctttgaatttgatcttcggcttctcatatttgatgccttcactgtcatagacagccatgcaatacatcttcttggcacgccatactgcagcagacgcaataacttcacgctcccaaaccatgcgttgctcatagccattcatcgtattgcagagcatctgtgcccattcattggtcttgggctgataattctccttgatccattggtcgatattatcaacaagtttgtggtggtcagtttctccttcccacaatttcttgaccaggcgctcaatacagatatagttcgagtccgtatcccccgcgataacataatccaggccgctggtcccgcacaatccgttaagataatcgtcagtgtaacgcttgttccacttattgatcaactgccctgaagttgtaatcgcttccgcaatgttgaggttaaagtattctttaaaccagacgttagagattgcaccataacctgcgttcatcaagatcttcagaccttgctgtaacgtgtcttgggcaacgccaaggtcttcccatttgtgcatcacttcggacaggtggtcaaggtcgatgttcttgtgctcttcataccagtcttggtcaaagtagcgggatttcatcgcggattcaaggtggaagtcacccttagccatttccttacaccagcccgcccattgctcatacttcagacccttggccttctcacctttacggtcagcgtaaatgccgcgcatgatctcagagaggaaggacattttctcattactgaagaactgaacgttcggtgtaaacgacacgttgtaacgcacgagggtttcaaaccggaattcacccaaggcaaccagttcatctacaacctgtagacgttcatcaatcgcgcggagcagcttgtcatgaagattcttcatatggcgacgtttatgcatcggcgtcgtcatatcgttcatcttagcagcaagctcttcacacatggcttcaatgatttcacgacgggtgtgtttatcgccgataatcgtttcaggcccaaggttgtactgctgaatgatgtgtgggtacagggagttcaagtcctctgagaagacccaataatagatccctggcgccacttccatgacatatgcgccttcaaagtttgtcggtccatcatagacgcgctggactttgggaacaatccccttttcgtacagcttgtaataacacatggccaaccatggcgctaccgtgcccaagccgtcttcaaagttagatttggtgcgatacgccaggacaaacatcagctgaatgagacgcagcttttgttccagacgccagacgagtttgacgtccttaataccataccgggtgtgcttacaataatcgttgaaatacagatcaaacagtgatttgctctcactgtaatccatcttcttctcaccgagttcgcaatacgcaatccagtccaaagaatatctctcacgtgtggtgtacgtgtgcttcttgtagacctgcaggtaatccaacataggacagccaacgaactgataagtcgtgatgtcgcccttcttatcccggatgatacgctttttgatcttaccccaaggactcaggcgattggtgtcggcttcacccaatacttgcatgcagcgttccaccaggtaggggctatcaaattgctcgatgttccagcctgtccagcagtcaaaggcccgcgcttcccagtaatcaacaaatgaccgcagcagatcttgttcggtggtgaactcttgatattctacttccagaccaccgatctcttcatcatttggatcatatttgaatttatggcgatccttagaacacggcatcccccagaccatatatttgttattggtcagatcctggagctgaatgagcgtaatcgggaatgccgcattcatgttctgggtgatcttgccatttgcgtcaatgatggggaactggtcggtcacgttgttggagataaaggagccagggaaatgctcgcggacgaacgcatggttggccaagatacgtttatggaactgacggacacgcgccgcgctccctttgaacgtctgtagttctatcgtcgggtgtgggaatggacctttagtcatctgcccatcgacccaccctgcagagaacacttcgatatcaaggttggcgatatgaatgttgttgtaatctggctgaattgtaccggggaaactgtgggcgatgaattgataggcatagtcggtctgaccatatatcgccgcgccttctacatccttgtattcctccatatagttgtcggcgtcacgcatagacgcaaactttttagaaatcagaggttcgttcaacaggccgactttttcaacattagaataatcagccgtgggtaaatatagagtgggttcgaatttctttttgagcatgcggcggttgcccatgtcatctgcaattcgaactaacaggtcgttgccttgccgggcgacgttagtatagaaaacagtcattgtattctccaggttatccgtgccgttagcacgttcccataatttaaccgaggagagttcattgaccaaggagtttatatggcaatccccttggtaagcatgattcctggcgctttgaaacagctctggaatctgggaactgatttgattcaatataagcgggaaattgtaagcgccaaacacgatgtcaagttagaagcgatcaaatcgtcttctgactgggaactatctaagatcacagaagttggtggttcttggaaggatgagttctggactatcgttcttgcggttcccgcgatcctcgttatgttagctcctgttgtggaactgcttttgttccccggcgaatatcataaaggggatttcatcaaagcagtagtcggtggcatgcaagccctggataccgcgcctgattggtatactgcttcattattgacagcaattagtgcatcattcggtatcaaaggctacaaccactttaaaagcaacagccgcaaggcgcaagctgtcgatgcccttaaacaattcggcgtcaaagtggttagcaaagatcccactgttgttactcagtcgggttctcccgatcttgagtctgctcccccagctgggtctactgcgacctctggtgcgtggcctgatctgaagaaataaggttcaaggggcttcggcccctttcttttggtgttaaggaatggatgtggtaaacaagagattgctcgtcacccagggcggggcgacgatagtaagaggccggatttatgaacaaactaaactcggctcacacaaaactagactgaaagtaaaagcaccagatggtggttggcccacaaatgtgattgttccagatggtctcatagaacgagggttcgcgacataccggggagcagagttcaaaatttattaaaaatttattgaaaaactttacttcttcaataactggcgtatacttcaaattgtagtacgaacaaacaacaatctgaagagaaggaaatacatcatgaaaattttagcagaaaccgcaaacaaaaacacagttttgtctgatgcaggtgaaggtcacgttttcggtaacttcttcggtgctgtggaaggcgacaaaatttctgctgggcgttacatggtcgtatatcatcctatcatgaaaggcgttcgccaagagatgaaacaaaaatttgactcctacgttgacgccatgcagttcttcctgttccagaagcgccatgagcgttttgtagaagccaaagacgccgggctggacgatgcaactgccgaactgattgccgaaggcaaaatgactattgaagccgctctgggcgatatggatatggacgccgaagcacattggattgaatattccgcataccagaacgaatgtgaagatgatccggaagatgacgggtttgatccagatctccacggcggagaagacgacaatacccctcctctggaaattctgatggcaggtggtcaggccgcttgggaatggcagaacgagaaaaatgcctggctggatagccgcctctaataccagtaaagccccttcgggggcttcttctacaaatttgaaacataggtctacacaaagaaggggctttcgccccttttcttattcgtcccagaaatcatcgtcatcatcgacgtcagccaattcagtatccagatcttcatccgaatactccggcagtttaccattctgttgcagataggcaatctcatcatcttccagctgcaggtcggtggcgatataaagcgcgtcgctttcttcatcatgctcaatgctgtacgacgtatattccatgccctgaacggtaatgatgatgctggtcggatcatcggggtcaacgtgcgcctcgaaaggaactccatcaatcggagcgtcttccaggaaagttgccagggcgatagcagcacgaacaacgtcggtgccttctacggacgcatagatctcttcagcgccagtttccccgcgctcaaaaaactctatggttgtgccgtcttgaacgccagtccagattggagcgtccagtattgattcagattcgaataaagtggagattgccatgtcagtgatcctcagtgtggattatggggtatttagccacactgagaaccatatatgggcaagacaaattaggaaggtataaatgtatcgacaaaaatgtgatcactgccaggaatatcacccaactccggacatgctgccttcatcggttctacatacggcttactaccaacgatccagaacagagagttctcgttcaacaactctggtttgtgttcctggatccacgtcatcaccttgccttcatagcgaggatgaagttcaatatcaccccattggtattccatcagatcgttgtaacgaacccaattggtggtgtgcaaatcccagtgatggacattaaagcgcggagaaccatccgctctctccagttctttcgggtcgtaacgacctaacaggccaagcagtgaaacgctcttaggggactgcggagcgtccttcttaccatacagataatccgggttgtcatgataatgacgagtaaagtccacgatgtgtggtaaattagcatattcaccaataatgcgcagacgactttcaatgaagtcaaggcgattaggaccgatgccgatcaggtacacatttttcagattcggtttcgggtgcatcgccagcccggttagaatactggtgcaagagttgcatgaacccgccgggatgatcagatcagtaatatgatccggaatgttggcgacctgttcaccacccagcatatggaatccagcgatgcgctccggggaatgcaatttatggtccagagtgatcccatactccagataatacgcctttggattctgttgttcaatcagcttcttacagcgcggctgtatagtgctgttataaccagaaccgacgaaattgaagatactaccaaaccaggcagacattgccaccatgtcgtggttcatacaagtggttggcttggttgcacccaggactgtagtcgtatgcccgccgaagtgccgagagactgccgtcgccataggggactgcggactaccaacgacagtaccatggatgatatcgggggagcctccggcctttaaatgctcaaccatgagccagatagcctgacggagtttgctgccgttgataccctgttgcccgtttgcatagttggacagcggcgcgaagtaatcttcacgtttgaaccaaacctgttggttggttacggggtttgcaacgagttcacacggggtgtgtttgtagagataatcttcccagtgaaccaggttgcggtctagagaaagagttttgaagatagttttgttgtgatgttgagagataataccccccatcgacgattcttcctttaacgcatcgctgacaaattcttcaaggatatcttggttgatactactttcacagctttggactgtaaatggagttgtatttgtttcaacaacagttttgatgtcatttaaaagtttctgtgttttatcgttcattctatttctcctgtagacattggcatatcatagcgtatctacaggagtatagaaaaggagaatctcgattactttctgaatatatccaggaacttcaggatctcagacataaagcctccccgcttacgttcggctgaaatctttttagattcaggaaccggaatagaactatcgtgacgtaattgacgggacaaagaaccatcatctttgacgacacgagttggtggcggcacaggtggtgctggcgggagcggaacttcgcgactacgcaccatggtttcatagtcacgggcgatctcaatatatttccggcgctcagtgaagaaatcaactgctttcactttacggcggcgggcatgagaactctcttcgccatagtagtcgtaattgttacgaaccatccagttcacagcttgttcaaatgtgttgaacaccagcatgggaatgccgtcgcctttctcaatacaatccagtgaagagtacccgacaatgacggtcatacctttctggaacaacttacaggggatggcgttacccggagtgttgcggttgcgcgggacgatgtgatcttcacggtgaacaaagttcggatacaagaactcattgagagttcccttgtagcccttgtatgtgtacatacggacgaatggaggaacgtcaacgaccacgtcgttcaattcccagatagtaacattgcgcatcaatatttcctcagttcatggttggccactgaattataacgcgattcggttatagattaacctatttgagagtcagaattatagacaaaaagaagcccggtatccttaccgggctttgataaagaccaaaatcacatggcctattcgcagttatgctacacagattattgggagagtgcgccgggaatcgaacccagagtcatcagaacttagaaagctatgtgcatttcacttacggttctgtgatttattcttcctcaacaccagattaagaaacaggggcatgcacaccttactgttcccgcaggaagtcgcacccataatttggaaggagcaccaggattcgaacctgagatcatgggatcaaagcccattgccttaccgcttggctatgctcctgcaatttggtgaagagttgcctgcgtcaccaggctggctgttctgtccatttaaggcttgcagcaggaacaacacggcttctcaccgttgatcccccaaagacttgagcactcttcataatttggtgggggaaggtagattcgaactaccgaagccgaaacacctgatttacagtcaggcccatttgaccactctggtactcccccgaatttggacgggcttctcacccgattgtgcatttgatctgccgtagcccaactccccgcgtcgtaacgccgattggttaaccggcaaccagtgccttctggttcgatctcctggaactttacaggctccgcgccaaaccatttctggtagttggggcatcgtttccgatgtggagtcatccccattttatacacagctggctgcaacgcttactgtgtttgtatcagagtctccggtgtagcattccgtgaggtgcgcactactgtagcctctacactctgaatttgtatgaagtgggaatcactctcctgggtgtctgtatcctgcaaacttacattggcagctatcgcgcgattcgcacttccgaaggcgcttcgagacactccacttcaatttgatgatgccacaccacgtctggtttgttgaatccaggattcgaacctgggatacctgccttacaggcgagtcgctttgcctcagcgttattcaactggcaccaatttggtgggcgttactttcgtcggtttcagattccgttcggctattggacgttgttccaaagaacttgtcggtcgcttacttcgtgcttacttgctttcgtttcacacccattgtctggcgatggtggcaggacttgaacctgcgacatatggattaacagtccaccgttctaccgactgaactacaccatctaaattatttggcatcccctccaggactcgaacctgggccgcacggctttggaggccggcatcatagccgctagaccaaggagacacattaactgttcttattcgcttctatggctcgaagttgcttctcagcgtcttctttggagtcatgcgttcccaaaacctttgttttggtatgatccagcacaacccaatggtcaccacgcttttcaacaaactcaacaatttctttgttgtcggtcgcaagaccatcccattcagttaagaactcaccgaacgttttcatcatactcaccaatcgtttattgaacaactggtttatttagtgctcccgaggcggtattttaatcccgcgatcccatctcgcctgccgtagaccagagcttgttggcagtccaacaaatttggcggggtctgaggattttcacctcacctgctggattggcctccagccgttctctctggggactcgccgtccggacagctatcccttaaactatcgccccttaatatggtgatcctgattggttttgaaccaatgaccaaccccttatgagggggctgctctaaccactgagctacaggaccttttgtttcttcaaattgtctaacacgtgtggattggatttcaacatcttcttcatgttgtcctccttacttaataattgtaaattccacaatacacaattatacttattgtcatcattcaaacccttctgggactagaccattaaaagcaacccagacaaaccagtgtagatattttctgagatatttacccatatattctactttgatttgcaaataaccagttccattgtctacacctaccaaatatctttctggtagtttttgttcatattccccaaactgatttttacggcgtatagtcagttctggctttttaatttttccatagttgctgacaaatacatgaataccaattttgtctaaatgcaactctttccaaatctcttccataacaactaccccgtcaaatcttatatttgtgcgcccaaccaagggctgctagaccttttatcccgtttgcgcatgatcagttcatgcgagtcttatcaagcaccttacggcaactcttctggatgtcatcgccctgctgccaggctcatcccaggagtttatttttccagggctttccacttacaagtcttaaccagaccgggatacgggcttgtaagatcgggttggacacaactttgaggacactgacgacgtctactagtcacccataactgatattcggatgccagtgtcctcaaagttgcaaccaatgtcgcaactcgcacctgagtgaaagtcaggcacttgtctattcgctagaccaggctgtttggtgtcgggtgcctcccgatgaccttaacacggaaaataaggccgggtgtgatgtaacatcatactcagggggatgagactattccgttccctcttgcgctagcagaattcaccaaacatagcagcatctatacagaagcaacttgtcctctaacgctcggaccaaacgaggctggctggttgattcagagccgctggttgctccagcaagcatgggttgatagcccggcaacatagaatcacccaaagatgaagaacactcagtggtacaagccagggataccaattttaggtcctttgcgagttctttaatgctcttcattttgtgaacttgagaatactacgcctgtctcgggtttccccttagttccgcctcccagtcatcgccgcgccgggtagctaaccctgatggcttgtctgctactgagttcttcttggtgcccaccagtgtccggaatgtataggcatcgcaatctgcaaggcgtggtctttctcacccaacgctctctcaagttcacaaatcgaagtgccctgactcaacagttgtggcccaacatattgttatcgtctaccgggctggccgtccactttgtagatcaacctttgggtttaagataaattgtcaaggcacttcgatttgtgtggatgtcatgcaagaccgggtgtctgccagatcaccagacattgtgttcagttttgaacagaggctgtagggttatgaaccgcaacatgtcttcaaaccttgcacaatgaaatgtcatctcagtcctgaatcacgttcacggtggtgagccactacaagtgagaaccgatttgcatttaccttgcattccatctttgagggcattcagtatacaacaggctccgatattgactagcgctattccggcgtcggatttaagttgcctttcccctgaagttccatgcagtttcgcgtctgacgcggaatgccctcaaagatggagccgttttagtcggcgggagcttattaatcacaccctcccgcctattgttagtgcgccgaattttgttatgaggaatcggaagacctcactgacttataggctattacgccgccatcagaacttcggaatcattagcagttatttgcttggtcagtttctaaaaacccgcaaagtcacgcacaacgagaacgaaaacctgtttgagcacaagacaccatgtcctgggttcacatcgaagtgtttgtctaatgcccaaacagcttttctctcagtgggttaactatactttgttaacccttattgacaaaactttttatttgccggaacttacgcatccggcctcgtcctgttggcgctcctagaatccgggaagacagtaggaacaattatgttaccaacaggaaacctttgtgttgccctttgacgcaacattatgaaccctctttagaagactcataatgttgtcggtgtgatgaggattaccagccctcgaccttcccatcgtgcggtgtcgactcgccgccgggatgctctcgtctccgctttgcgggtactttctgagctaatcacacttttaacagggagtttcgttctccgacggtcagtgcgtccaccaacaccagcagggttactgcgctgcctctattcacacaagcccctgagactaggggttaactggtttcgggttcaagcctactcccactgtgctgtttcccttgaaattttatgatactgcaacacggctaatttgaaaagtcctctcctcttgagcaacaggacctgaaatcctgcggcgaacctctgctcaaaacccggtgcgctatcgaaggcgctttgccagagtaaacatcgggtgttcccaggagagtgaaggccatcccgatgatgaggataaggagtaacgctatgattgtcatactgttccctcccttccatgcaacttactttactgtaattctgtattgaataaagcgttattttaccacagaaaacttcacaaccttctctagaataaacacatattcctgagcagctgcattcgacatataatgcgtagacggaatagaatgtgaattcgttgtttcgcccagattaacgcggtcacaccagccattgatggcattaccgtagaagccgatgatcgcaacgaagtagatgcgctggctttctggttccagaacatagttgatcgtgaacgcagtgtccgtgcggacggcttccagtttgatcccaatacgacattccggcatgttgggacgaacatataaatgacggaagcggtcgcggcgggcggtggaagattgttccagttcgttgcggaactcactcgtgacgtcgatgttaaatgaaaaggtgttgtgtttcatatcggaacgagcaagggaaaccgcattgtcgataacgcgacggaaatttacccctttatttgtcaggagtttaacttcctcagcaattgtcgtcaaagaaattttggtggcttgttgtccttcatatttttctaataaaggaatgatgtgtttcataactgcggtgttaatgtgcataataagatcctcttgaagaattgaaataaacgccatcattataatagaacgattgttattgaatattaatctctaaattacaggagtgttttattaataggcagaaactacttttctaacacatctctagactgtatgctaacgctgtgcccttcgagttgtgagtgtcaacgaacaacgagaagcagcctccctggctgtggaagggtgccagcccgcacagggcggtcttacgagcgaagcgagttgattaatatatttgataataacgcgcgcgagagcaaatccctttctctgtcttcaacagctaaatatctccaacaccatattcaaacttgtgtgacggagatcaacatggctacacaaacagttccttcactcgacgtcagggctttcgaatacattatcaagcagcgtatgaaagctgatccgaccttcaaggattatgactttgaaggatctggtctcagtgctatcatccgtctgctcgcctctgacgcgaatgctatcggctttatgcaaaacatgctgaacggagagagtcacctccaatcagcccaacaacgttctaatgttggtttgtcatctgcattcttgtcgtacactcctgagaactatcaggcggcgtacatgtatgcaaatgtcaaagtcaccccctacgatgcggccacagcaccaagcgaaatcatcatggatcgcaaggttatgtttgttggggccaaagatgggaagtcttacaacttcaccgttgaaaaacctgtgtacacaaccctgcggccagaaggatattatctttttgagaatgtgaaactcattcagggtgattggctttacaaaacgtatgatgttgaaggtagcgcgatcagtacatacaagatcccatccaccaacgtagacatcaatcatctggttgtcaacgtgcaggaatctgagacttctgatgtgtcttacacgtttgatcgttacaacagtccgtttgatctgaatcaatacgctcgtctttatttcgtggaattgggacttgatggattctatacctttgaattcggggatggttatatttgtcgtcgtgttgaagatgggaacgtcgtgttcttacagtatctggagacttccggtgcggacggcaacgatattacttcagtttcatccgcgactgcgatcgctgggaacaacctggtggatatcgaactcgtgtcggaaagaagtgcgggcggtactgatccagagtccatagaggataccaagcgtcttgcccctctgagctatcaggcggacggcgcagcagtagccgaaacagactatgcctacctgacagagaaactcttctcgaacgttctacgggctaaaggctatggtggagatacgctcaatccaccggaccctggttatgtttacatcgctgtaatcccaactgtgggtgaaacactttccgatgctgagaaagccgatatcgtgtctactcttgacaaatacaatgttggttctataactccgaaggttgtggacgccgaagtcacgtatatccaggtcaacgccacgatattctgggacccgacggcaacagcgtatgctgaagacgggttgaaaactctcgtcaagaaaggtgttgtaacctggggaaccaataatcttgacaattttgatgagctgtttgacaaagaagttttacaaaacgccataacagatatggagcgttccatcgtttccaacatcacttctgtagcatacaagcgccatttcaaaccagaatatggcgttcttgacagctttacgtttgatttcggtcgttccatcaaatctggatcggttgttattaacgggttcaagccgcttccagctgaagttgacttcacttattacatccgggatgtaaatggtgttctcaatatgtacaaggtcagcacttctgatacgacgaaggaatatctggtgcaggctgttggtgtcgttgattacgcaaatggcgtcgttgaacttcagcagatcacagtgtcaaactatgatgaaggcggcgcggctattgttgtatccccagaagggttgaatcagaacatccaggttgcatccaatcaggttcttcgtattggtgatgtaactgtagacgcggaggtccgctatgtccaaagatcttaataacggacatctgggcgtcaaatatgagacgccgttgttctaccagaacgatttccctctgttcattgagttcatggatacgttcttcaattggctgtaccgccaaaatggtttcactgaagaagaaatccttgcttacctggcagacaccagttggctgaatccggatagtgacgccagcccgctgatgcagctggtagacctgaagatacagaagacgcccggtactgctgcgcgtgatatgctccttgacaaatatctggtcaggacatttgagcaaatgatggcgctcgatacagaagaattgttggactctgatggtcgtcctctgttttcacctgaagacaagaattcaagtattgacgcctggtataaagaattcgggtttcaaagaacggttgacaaatcttttcctgaattcgggttctttgtaccagaagggtctgatggtcttgttacagcggatggcaaccagttctcggtttatatcgagggtacgcgccgccggacattagaccacacccgctggttaaaactgttgaagcatatctataagatacggggaacacagaaagcaatagaattgttcttctggatttatttcggtgttccagttactgtgtattatccaaaagaagatttggctggtttggatgctaactttgattgtgatggtgaagttggtctccgtgatgattactactatgacgaatacacatatgtcataagaatacctggcgacgtcgcagatttcgaaggtgtattcgatcgcgtgttccgtcaacacttccatccatctggtttcaaagtattcctcgaaagcactaggagttaagaaaatggctgattatctgagcaaatatacaggccagcagatagataatattctagatgcggtcgatggaaaactgaataagactgatgtcgtcaatgacatcacagtagatgacgacctgtccccggcgtcagcacatcttacgttcgtcttgaaatctgctatcgatacgatgaacgatgttttgaccaataaagtcgttcggaccgatgggcaagaacaaacgataaacgggaaaaagacttttgcatcagtgctgaatgcaaacggtgggattttcgtcccggcccaacgctctataacgatcacggatgaacctgcggccaacacggatgcggtgaacctcagcatgttgaaaaaacatggtctgagcactgtggactccgttggttctggttctggtctgaagatttcgttgctttccaatggttacaacaaattggaagtcgatctctccaatcttgtcgtgaggacagacacaacgctccctcaatcgctggcggtgtattcaccaacaggtgggtcacaaatatggtctatgacaagtctgtttaacggtatattcgctgacactcgtttcaacgattacgtgaaggtcgtggattatgattcagatatgctgaacattgaaacgcaattcaccagtgtaaacaaccgtataaacctgaaactggatactgcgacatatacgacgaaaatgacgagtctggattctcagatagcgaatttacaatctgggaaagtagacaatacgacgtatacgacgaaaatgaccagccttgacagtcaaatcagcggcctgtctacgaataaggttgacaaatccacgtatgacaccaaaatgaccagtttagatagccaaattagtggcctgtcttcaaacaaagtcgacaaatccacgtatgacaccaaaatgaccagccttgatagtcaaatcagcggcctgtcttcaaacaaagtcgatgtgtcaacgtacactactgatatgaacgccttgaatttggcgctggcgggttcggtgaaattggctaaaaccaacaccaccagtgtttctgtcccggcttctggtagtgctgcgttacctgatttcactttggtgaatctgtgtcaaattttgattacagccaaatggggtacattggttgatacattcttggtcacaatgacgtatgacggtactcttcaggcgacgtcgttgacacaaaaaagtacggcggggactttgtcgttcgcaggttctgttgtttcaggtaaactacgcctgacaatgacgaatgctaatacaacaaccgcagcatctgtcgattactcacttcgtgcttctttctaaatcttaaactaaatacccctagacgattacatgtgctaggggtattttcaaatggctaataaacccacgaaaccaaattttccgcttgggcttgaatcacaagatcaatccgtatttcaagaaggtattctgaataatggtgttgtagaacatggcccagatgcggtaatgactgtgccagaaactcctgacgcatctggggttccttctgctgtccgttataacgaagatgacgaccagtttgaaggattttacaacgaaggcggctggttgccgcttggtggcggtaacggtgggcgctgggaagcacttcctcatgcttcctcttccctgttacaagcaggacgtgcatatctggtagataatacggacggcgtctctacggtgctgttcccttcccctaaacgggttggtgacagtgttactgtttgtgacctttatggtaaattttccacttatcctctgactgtagacggtaacggtaaatcgatctatggctctgctgatagcatgacgatttctaccgataatgtcagtgcgacgtttacgtggactggtgaagcccgtggttgggtgataacttctggtgtgggcctgggtcaaggccgggtttatagtcgcgaaatctacagccaaattctgtcagcgacaacaccatctattaccctgagcacccaaccatctattgtagatgtgtacgttgacggaaaacgtttgaaagaatccctgtatactctcgacgggtatgaagtcaaattcgatccggcgttggcctctggttcagatgtgcagattattcagtacatcccaattcagctcggcgcgggcggcgggggttctggtggaactgtaatcacctgggaatacaacggcggttcagctatcggcggcgaaacccaaatcgtgttggatgtggtcgtggactcagtatctgagatctacatccgtggaacccgtcaacagatagggcgcgggttcacatttgatcctgctaccagtacgattactctggcggatgaactggaagccggggacgacgtcgtcgttgttattaatggggatccaacggtctataaccagatcgatcgcactccttgggaagtcgcccgcgcgaataatgtaagcaattccgaagttattctcagtaccgacaagcaaactgcgttggatggcaaaacagttctttacgatgtggaaactcagactagttggagcataccaggaggcataccagctggtgctaaaataatatctatcaacccacaaggtaaattacaacacacatatggggatatgtttttaacgtatttctttcgtactctcacagcggaaacatacaaagaattgcagtatacaacaccccaaatagaaggacagatgatttttttgagagggttttacgctgggagttcgtttggctcaggttattttacggccagaaataaaaaagaaagtgatactgaaactgggggtattatagctgttgtagatgaaacctgggtgtgggaaagaaatttatatggcgatagtgtggatgtaacaatgtttggttgtgaccctactggttccacagagtgtcatgaacagttaatgaatgccttaaattactctgctactcacggtgtgctactgacacaatcaggagttacccttgttgggcagtcagttatagctccaaccggaataattattgatttttctggctatgttgtcatgacagatgcaacaaatcttgagacaacttatggtgggtacgcttgggtgcagggtgcatatcgaggtactactacggatgcttacaccaatataaaaaatttaaagttgtctacaagccttgatgatttgatgcgcggtgctcctcgcacttcaccatttgatggcaagggactgtgtgtcatggagtatattacacacggatatatttacactgctggtttccaatatggtggcgtttatattgctaaagaaaagggtgctatgcgcggggatatggtcgagtgctacgtgagagccagaacaagtaatgacgacaaatactctaaggcatatggtttttacaacgctggcgcagacacgaaaattgacaaattaaagtgtataaaatatgcgcgaggcgcatggactggtgattttagttactatggctcaattcactgctgggggcttcctgcggtaatctccaccgatcctaatgcggaagggtataagtggggaacaatgctggctggactatttttaggcacttcatcatacgtcgggtatttctattgcgacacaccagaaactactggatatgatgtagcggcaatttatgatgatgctgctgatatctacatgggatatggattagtgctggtcggctatgaaagcatgatcgataactacatgtttctaatctataaagactcccaaaaagttaaaaaatgcagaattgcacattacaaggatggtagaaaccagcataaaatagggtacttatcctgtcatgacggagcgctttttgatgatacaaatgcaataacttatgcaaacaagaatcaagattttttccagaattacatagataatctttctggggcgtacctgcatcagtacattgatacatggtctgcaaatgcagcaacacatattgttttcaatggtgtgacatcacatagtggcactataaaatatgtaaggcgaggtcaatctctggatgtgtatcttaatgttgtgttttccgcagttgatactttagccaccagctttaatatgaaattcgtaaatatcccaacggatgttcttactcagagttcgacaatgccggttcacaacataacaacatggggcggcatctctaagccaccaactgctgtgaaaacattaaacgttatgaatggcgcatcccaagtggggacggtgacagtttctagaaatctatctggtcttacaatttcttctgtaaattctggtgtgataacctttaaatttattgatattgacgatggcacggcctggaatgtaactccatcacaacttaggactggagggctggtgatggttatttccctgcttttataatcttataaatacccccatattggtaacgccttatggggtattttcaaatgtccagaaacgtagaagaaattttcggtggggtagtcgtagcaccccaccagatcccgttcaagtacacttcaacaaacggtggggaaactttcctttccctgccattttatcccatcaccgggtttgttactatcaacggtggtgtgcaggttcctcttgataatttcgaaatagacaggaatacattaaatcttggccgcgaactggatccaggggatgttgtattctgtctgtttgataaaatcatgtctcctcaggatgcgagcaataatgcaattcgtatctacaaattcctttctgtcggtggtgaaacagaatttactcctgatttcacggcttatggtgtgcagtctttgtacatagacgggaaatacaaaacgcccggcgaagattacaattatttcaaaacttcaggtaaagttgtgctggacactgcgttgaccgcaggtgtgtgggtagttgctgagatgtctatcaagcaaaatattccagcgctggcgggcaacaatggtgcaagtatggtgggcacagctagtggggaaactgttcaagaagcattagatagtggcacacttgctattgatgcattacgccaagatctgggttcgagtgacgggctgaaattgattggtcaatgctcagatgtaatagctctcaggactattgaaccaacccaacctaaccagcgaattagcgtagctgcttattctccaggatgggctgcactcgcaggtgtgccagttggtggtggtgagttctactacgattcaaatgattccacctcagtagataatgacatttttgtgttcgttacaactgggggtaaacgctggaaacgacactgtaataaagactatattgatctttcctggataggtttgcagtcaggcaatgacattgcaccatactggcagaaagcaatagacttcattcataatgcggctatagggaagtcatccatctatgacctcccttatatcaggattacaggtggtagttatctgttgtcatctactgttacgacgcctccgtacatatccacagtatttacaaaggatacaaaactagtagcagactctttagttgatggaacccatgaagccgctattgttatttactgtaatgatgcagtaaatctgtataacaatgacaggagttcttcattcccgaaaaccatctcatgcagcgccggtaaggttaggctggtacgagctggaacaagagcgacaaccaacccaattggtctttataccaaaggtgcaacatcaacagcgcacgctatcaacatgagagtttcagatttagaagtctatggtgcgttttcagctggtcatgggaacacagcgacacgaacctggttgatgcgcttcgataactgtcagttcaatggattttatggtttagcttactatggcacaaatactgacagtggtgagagaatatcatatagcaactgcgtgatctcaggcggatacaatgacgctacgactaaagccatttacatggcaacatctggaataaatatccatcttttatcgtgcagcatagattttactggcggtgatattatctatatgaccgcttcagctaagtggtgtaatattgaagttgaagactcacatattgaaagctggaacggttatcttgttaatgcggagtcaacctctgatgtagccaggttcgtaacatttcgtggtacaaacctgttacctaccgggtcgcttggttacgcgcagtcgctttcgagaaaacttctcaaaggtgcagcatgtaaagttctttttgacgacagtttcatttcatggactgtatacccttacgactcttacgacagcatccttgaaactggatcaactatcacggtacgcgttagaaatcacaaagatttagcgttaggtttgcatccgtttactacggctaaccgtctgttgaaagtatatgattttaccaccgagtccgtaggtaatgtgctgacatctagcacatcaacgacaacaacgacgactgttagaaaatacagttccagtttttctaacgtgacagcaatcattgctgcgcttgataactcgcttatcgatacaagtctggcgtctggtacgactaacacgctgaaattaacatggggtgcaagtggatatgcttatattgaaacagtagagaaggtgagagtaacaccatcccgtgattacagcatgaaagctacggtcattatgccggatttgacaagcaaactgaatttagcaccagcaatcgcgtggtatgatgagaacgatacactcatatcaaaaactgatatttactatagtgacatgaatgccatagttaacacggcaatcactggcgttgatccatatctatcacgtgcaaacaaaagagttgcttgcaggacatcagcggtcaccgcacctgctggtgcagcttacgcacgtggggttatgcagttaaccaatggaaccactggttctatttactacttgactgactataatttgtttatttcgccaacaaattaggtcgttgcgaaaacaacacgagctggacggcgtgacctagcaatgggttcacgcctaattaacgaaattggactattttaagattaatccatgaataagatgtttacgcagcctactgcgtcggtggttagacactaaaggtagattttagatagaatagaccatccaagaaaagaaatctatgtggaagaattgaaagatcgtctaaaattttttgtctatcggctgaggtttttgtaattactgttgacagcaacaactatgtgatagtttctggacaaacgtctattaccgatgaacaagtaattgatacaattgtttcgggaataattaattccgttttataagcagtactaacgaattccgatatcatagaaaaacaacaggagattcatcatgaatccgcaatttagtcaggccggtggttccgtctctaaagacgtgaacaaacaatctatcgcacgtgtatacggcgttaaaatgagcgaagtcgcttatttgaaagccggattagtattgaatggttataaggtgttgtttgataaaacaacccaaacttgttggaaaagtggcaacgccacaggtacatcgatttcctggcaagtctctggtagctctctgaacttagtaactactactggctcgtatgtactacccctttttgacatacttgcaaaccttggttcaggcgagggacttcttcaaataggaagtgtagctaccattgctcaattatccacagtctcccccgtaacggtaggtcagcgcatacaagttaccgaatatgctttaggttatgtagtaggtggtggtaactttattgtacaaaagtcatctgattatacggttgacggtgggaaggtagtggcatccgcaacgtcggggttagtcttcgtacgtgaggaatactatgcgtcccgcactgttaagcccgaatggtacggttgtcgtggtaaaggctcggccatacccgacacagttccgtttaaaacgatgctcggtgcccttgttaatggcgactacatcagattgatggccaatgctgtttattacaatagctttcccaataattcgcaggcaatagatgggtggacaataaccgccgataatatcacattagacggtgtgggcggcgccaccctgtcccgcgcaacaccttcatcagcaagctactctggttttaccacgctcaagattgccggcagtaaaaacccgagactggtggggtcactgctcatcacctctgatgaccccaccaacaggcctttatacgcataccaaagtttgaccaaaatcgactcaagggagattttcacatctcccttggccaatacgctgggcctgtgggcgtctggcgttgatggcctttatatcgataaatcggtaatactggaaagagctgtcttcccttacttcgccaataacggcacaaagaacaaaaaggtgttctgcactgccagaaaatcaggtcagatttacccgcagccgacgtcagcaagttcagatttggcactcggtagtaccttcaagctggatgcgtgttccgactttatcatggaggttgttgccaatgattcggcatatgcaggcattgagtctgagagtaacaacgtcaatggcagcataaccctagtaaccaatagggcgtaccatgccggactccatttatggaacagatgtaagaacattacttacaaggtctccgcgacggatatcgttgaggggggtggcgttattacagggtatggttgcgaggcatgtagcggtgacgttacagcctataacgcacaatacgtcgcggcattcataggaaattccgcaacaacccccgttataagctgcaacgtaaaaggctctgggtatggtgtgactgatgctgttgtattctatacaacggctgcgaataatgcctatatccagcactgtaacgtggatattactgccgtgcacgctgatgtattctccatcggcactggccgacaatcagctatcaagttcaatggcgggcagtactgtgacatcaaagtaaatgccaaagattttgactacatattttcacttggcatgggggcaaataacaaatttaatgttgcatataatgcattcaatacagcgttctcgtactcagatcaacgatcttttgacaatgagtataaatacactgaccctgctggcagtgtgtaccatttgcaggcaaagggaagttcttatgagtacaggtcagatgctgtcactaacccggttcttgggtataaggcactgctaagaaagcagatagttacagatgggtttgttaatccgaacctgccacaaacaactgcatcggtgggtggtttttactatgacccaaccacgaaatatgtaag
